(19) United States
(12) Patent Application Publication
(10) Pub. No.: US 2025/0312491 A1
(43) Pub. Date: Oct. 9, 2025

(54) BASE EDITING OF TRANSTHYRETIN GENE

(71) Applicant: Beam Therapeutics Inc., Cambridge, MA (US)

(72) Inventors: Alexandra C. Chadwick, Cambridge, MA (US); Kallanthottahil G. Rajeev, Cambridge, MA (US)

(73) Assignee: Beam Therapeutics Inc., Cambridge, MA (US)

(21) Appl. No.: 19/204,091

(22) Filed: May 9, 2025

Related U.S. Application Data
(63) Continuation of application No. PCT/US2023/079329, filed on Nov. 10, 2023.
(60) Provisional application No. 63/383,394, filed on Nov. 11, 2022.

(51) Int. Cl. A61K 48/00; C12N 9/22; C12N 9/78; C12N 15/11; C12N 15/88

(52) U.S. Cl. CPC A61K 48/0058; C12N 9/226; C12N 9/78; C12N 15/11; C12N 15/88; C12Y 305/04002; C12N 2310/20; C12N 2310/315; C12N 2310/321; C12N 2310/351; C12N 2320/32; C12N 2320/34

(57) ABSTRACT

Provided herein are compositions for gene modification related to base editor systems, and methods of using the same to treat or prevent conditions associated with the extracellular deposition in various tissues of amyloid fibrils formed by the aggregation of misfolded transthyretin (TTR) proteins. Such conditions include, but are not limited to, polyneuropathy due to hereditary transthyretin amyloidosis (hATTR-PN) and hereditary cardiomyopathy due to transthyretin amyloidosis (hATTR-CM), both associated with autosomal dominant mutations of the TTR gene, and an age-related cardiomyopathy associated with wild-type TTR proteins (ATTRwt), also known as senile cardiac amyloidosis.

### CROSS-REFERENCE TO RELATED APPLICATIONS

[0001] This application is a continuation under 35 U.S.C. § 111(a) of PCT International Patent Application No. PCT/US2023/079329, filed Nov. 10, 2023, designating the United States and published in English, which claims priority to and the benefit of U.S. Provisional Application No. 63/383,394, filed Nov. 11, 2022, the entire contents of each of which are incorporated by reference herein.

### SEQUENCE LISTING

[0002] This application contains a Sequence Listing which has been submitted electronically in XML format and is hereby incorporated by reference in its entirety. The Sequence Listing XML file, created on Nov. 10, 2023, is named 180802-046902US_SL.xml and is 5,147,724 bytes in size.

### BACKGROUND

[0003] Transthyretin (TTR) is a 55-kDa transport protein, for both thyroxine (T4) and retinol-binding protein, that circulates in soluble form in the serum and cerebrospinal fluid (CSF) of healthy humans. Under normal conditions, the TTR protein circulates as a homotetramer. Hereditary transthyretin amyloidosis (hATTR) is a disease due to mutations in the gene encoding TTR. Autosomal dominant mutations destabilize the TTR tetramer and enhance dissociation into monomers, resulting in misfolding, aggregation, and the subsequent extracellular deposition of TTR amyloid fibrils in different sites. This multisystem extracellular deposition of amyloid results in dysfunction of different organs and tissues. In particular, polyneuropathy (ATTR-PN) and cardiomyopathy (ATTR-CM) due to transthyretin amyloidosis are severe disorders associated with significant morbidity and mortality.

[0004] Since TTR is mainly produced by the liver, an early therapeutic approach for the treatment of hATTR amyloidosis was liver transplantation. Other therapies include the administration of oral drugs that act as kinetic stabilizers of TTR tetramers (such as tafamidis and diflunisal) and the suppression of TTR protein synthesis with gene-silencing drugs such as small interfering RNAs (siRNAs) (patisiran) and antisense oligonucleotides (inotersen).

[0005] The invention here recognizes that a gene editing approach for the treatment of transthyretin amyloidosis, including both polyneuropathy and cardiomyopathy, has the potential to deliver a once and done treatment with superior results to existing treatments.

### SUMMARY

[0006] Provided herein are compositions for gene modification or editing and methods of using the same to treat or prevent conditions associated with the extracellular deposition in various tissues of amyloid fibrils formed by the aggregation of misfolded transthyretin (TTR) proteins. Such conditions include, but are not limited to, polyneuropathy due to hereditary transthyretin amyloidosis (hATTR-PN) and hereditary cardiomyopathy due to transthyretin amyloidosis (hATTR-CM), both associated with autosomal dominant mutations of the TTR gene, and an age-related cardiomyopathy associated with wild-type TTR proteins (ATTRwt), also known as senile cardiac amyloidosis. Compositions and methods directed to editing the TTR gene using an editing system such as one comprising a base editor and guide RNAs are disclosed.

[0007] In some aspects, provided herein is a base editor system for modifying a target Transthyretin (TTR) gene, comprising a guide RNA, comprising a sequence defined by

(SEQ ID NO: 11)
mG*mC*mC*AUCCUGCCAAGAAUGAGmGUUUUAGmAmGmCmUmAGmAmAmAm
UmAmGmCmAmAGUUmAAmAAmUAmAmGmGmCmUmAGUmCmCGUUAmUmCA
AmCmUmUGmAmAmAmAmAmGmUmGGmCmAmCmCmGmAmGmUmCmGmGmU
mGmCmU*mU*mU*mU (GA521),

[0008] wherein A is adenosine, C is cytidine, G is guanosine, U is uridine, mA* is 2′-O-methyladenosine, mC* is 2′-O-methylcytidine, mG* is 2′-O-methylguanosine, mU* is 2′-O-methyluridine, and wherein nucleotides represented in bold are linked by a phosphorothioate (PS) backbone linkage,
[0009] the guide RNA directing the base editor system to effect a nucleobase alteration in the TTR gene.

[0010] In some aspects, provided herein is a guide RNA, comprising a sequence defined by

(SEQ ID NO: 11)
mG*mC*mC*AUCCUGCCAAGAAUGAGmGUUUUAGmAmGmCmUmAGmAmAmAm
UmAmGmCmAmAGUUmAAmAAmUAmAmGmGmCmUmAGUmCmCGUUAmUmCA
AmCmUmUGmAmAmAmAmAmGmUmGGmCmAmCmCmGmAmGmUmCmGmGmU
mGmCmU*mU*mU*mU (GA521),

[0011] wherein A is adenosine, C is cytidine, G is guanosine, U is uridine, mA* is 2′-O-methyladenosine, mC* is 2′-O-methylcytidine, mG* is 2′-O-methylguanosine, mU* is 2′-O-methyluridine, and wherein nucleotides represented in bold are linked by a phosphorothioate (PS) backbone linkage,
[0012] the guide RNA directing a base editor system to effect a nucleobase alteration in the TTR gene.

[0013] An engineered, non-naturally occurring base editing system for modifying a target Transthyretin (TTR) gene, comprising (a) a guide RNA molecule having a sequence defined by

(SEQ ID NO: 11)
mG*mC*mC*AUCCUGCCAAGAAUGAGmGUUUUAGmAmGmCmUmAGmAmAmAm
UmAmGmCmAmAGUUmAAmAAmUAmAmGmGmCmUmAGUmCmCGUUAmUmCA
AmCmUmUGmAmAmAmAmAmGmUmGGmCmAmCmCmGmAmGmUmCmGmGmU
mGmCmU*mU*mU*mU,

and (b) a codon-optimized nucleic acid encoding a Cas9 protein fused to a deaminase, wherein the Cas9 protein fusion is capable of binding to the guide RNA and of editing the target TTR sequence complementary to the guide RNA.

[0014] In some embodiments, the deaminase comprises a cytosine deaminase or an adenine deaminase.

[0015] In some embodiments, the Cas9 protein is a catalytically impaired Cas9 protein.

[0016] In some embodiments, the Cas9 protein is a dead Cas9 or nickase Cas9.

[0017] In some embodiments, the cytosine or adenine deaminase is a deoxycytosine or a deoxyadenosine deaminase.

[0018] In some embodiments, the Cas9 is fused to ABE8.8.

[0019] In some embodiments, provided herein is a lipid nanoparticle (LNP) comprising the system described herein.

[0020] In some embodiments, the LNP comprises an ionizable amino lipid, a neutral helper lipid, a PEG-Lipid, a sterol lipid and/or a GalNAc lipid.

[0021] In some embodiments, the ionizable amino lipid is VL422 or LP-01, the neutral helper lipid is DSPC, the PEG lipid is PEG₂₀₀₀-DMG, the sterol lipid is cholesterol and the GalNAc lipid is DSG-PEG-Lys-tris (GalNAc).

[0022] In some embodiments, the ionizable lipid is LP-01 (or CIN16645) defined by the structure,

[chemical structure]

[0023] In some embodiments, the LNP comprises an N:P ratio of between about 1:40 to about 1:1.

[0024] In some embodiments, the LNP comprises an N:P ratio of about 1:6.

[0025] In some embodiments, provided is a pharmaceutical composition comprising the LNP as described herein.

[0026] In some aspects, provided herein is a method of editing a TTR gene in a cell, the method comprising contacting the cell with an LNP comprising (a) a guide RNA molecule having a sequence defined by

(SEQ ID NO: 11)
mG*mC*mC*AUCCUGCCAAGAAUGAGmGUUUUAGmAmGmCmUmAGmAmAmAm
UmAmGmCmAmAGUUmAAmAAmUAmAmGmGmCmUmAGUmCmCGUUAmUmCA
AmCmUmUGmAmAmAmAmAmGmUmGGmCmAmCmCmGmAmGmUmCmGmGmU
mGmCmU*mU*mU*mU,

and

[0027] (b) a base editor system comprising a codon-optimized nucleic acid encoding a Cas9 protein fused to a deaminase, wherein the Cas9 protein fusion is capable of binding to the guide RNA and of editing the target nucleic acid sequence complementary to the guide RNA.

[0028] In some embodiments, provided herein is a method of treating a disease or disorder, comprising administering to a subject in need thereof, the pharmaceutical composition described herein.

[0029] In some embodiments, the disease or disorder is hereditary transthyretin amyloidosis, cardiomyopathy, polyneuropathy or senile cardiac amyloidosis.

[0030] In some embodiments, the pharmaceutical composition is administered by a route selected from intravenous, intradermal, transdermal, intranasal, intramuscular, subcutaneous, transmucosal or oral.

[0031] In some embodiments, the LNP is delivered to liver.

### BRIEF DESCRIPTION OF THE FIGURES

[0032] FIGS. 1A, 1B, and 1C. A general schematic of a gene editor complexed with a gRNA targeting a gene of interest. Cas9 protein, guide RNA, Spacer sequence, protospacer sequence, and PAM (protospacer adjacent motif) are identified (FIG. 1A). FIG. 1A discloses SEQ ID NO: 5760. Additionally, schematics of general principles of base editing with cytosine base editors (CBE) (FIG. 1B) and adenine base editors (ABE) (FIG. 1C) are illustrated.

[0033] FIG. 2. Alteration of splice donor sites resulting from base editing. Top panel represents normal splicing of RNA transcribed from a gene. Bottom panel represents splicing that may result from transcription of a gene that has a disrupted splice site due to editing.

[0034] FIG. 3. Map of the human TTR gene (hTTR gene), shows the location of various restriction enzyme recognition sites, Exons 1-4, and the single guide RNAs GA457, GA459, GA460, and GA461 specified in Table 1.

[0035] FIG. 4. Nucleotide sequence of the human TTR gene (UniProtKB—P02766 (TTHY_HUMAN)) from the reference human genome (GRCh38) is shown and depicts the region on the gene where guides GA457, GA459, GA460, and GA461 are located. FIG. 4 discloses SEQ ID NO: 5761.

[0036] FIGS. 5A, 5B, and 5C. A schematic showing TTR guides and editing locations for GA457 (FIG. 5A), GA460 (FIG. 5B), and GA461 (FIG. 5C). Human genomic DNA (gDNA) sequences are labeled in black. Guide sequences are highlighted in grey above. Genomic exon sequences are in uppercase letters and intron sequences are in lowercase letters. The main position targeted by ABE editing is labeled with a black arrow. FIGS. 5A, 5B, and 5C disclose SEQ ID NOS 1, 5762, 4, 5763, 5 and 5764, respectively, in order of appearance.

[0037] FIG. 6. is a graph representing the percent splice editing in human hepatocytes using ABE editing with single guide RNAs GA457, GA459, GA460, and GA461 guide RNAs. The three TTR guide RNAs GA457, GA460, and GA461 show high activity in human hepatocytes. Each of the guides employ the identical tracr sequence and differ only by their RNA spacer sequence which corresponds to specified DNA protospacer sequences on the targeted TTR gene.

[0038] FIG. 7 is a flowchart of the ONE-seq protocol for determining candidate off-target sites.

[0039] FIG. 8 is a schematic diagram comparison of GA519 and GA457 hybridized to NHP and Human TTR exon 1. FIG. 8 discloses SEQ ID NOS 1, 5765, 2 and 5766, respectively, in order of appearance.

[0040] FIG. 9 is a schematic diagram showing a comparison of GA520 and GA460 hybridized to NHP and Human TTR exon 3. FIG. 9 discloses SEQ ID NOS 5767-5768 and 5767-5768, respectively, in order of appearance.

[0041] FIG. 10 is a bar graph showing hepatic editing of TTR gene by LNP1 and LNP2 in Non-Human Primates (NHPs) as described in the Examples.

[0042] FIG. 11 is a bar graph showing serum TTR protein changes as measured by ELISA in NHP treated with LNP1 and LNP2 as described in the Examples.

[0043] FIG. 12 is a bar graph showing serum TTR protein changes as measured by mass spectrometry in NHP treated with LNP1 and LNP2 as described in the Examples.

[0044] FIGS. 13A and 13B are a bar graphs showing serum Alanine Aminotransferase (ALT), FIG. 13A, and serum Aspartate Aminotransferase (AST), FIG. 13B, concentrations in NHP treated with LNP1 and LNP2 as described in the Examples.

[0045] FIGS. 14A and 14B are a bar graphs showing serum Lactate Dehydrogenase (LDH), FIG. 14A, and serum Glutamate Dehydrogenase (GDH), FIG. 14B, concentrations in NHP treated with LNP1 and LNP2 as described in the Examples.

[0046] FIGS. 15A and 15B are a bar graphs showing serum Gamma-Glutamyl Transferase (GGT), FIG. 15A, and serum Alkaline Phosphatase (AP), FIG. 15B, concentrations in NHP treated with LNP1 and LNP2 as described in the Examples.

[0047] FIG. 16 is a bar graph showing serum total bilirubin concentrations in NHP treated with LNP1 and LNP2 as described in the Examples.

[0048] FIG. 17 is a bar graph showing serum creatine kinase concentrations in NHP treated with LNP1 and LNP2 as described in the examples.

[0049] FIG. 18 shows bar graphs of serum cytokine concentrations (MCP-1, upper left panel; IL-6, upper right panel; IP-10, lower left panel; and IL-1RA, lower right panel) over time in NHP treated with LNP1 and LNP2 as described in the Examples.

[0050] FIGS. 19A and 19B are plots of plasma pharmacokinetic profiles of iLipid (FIG. 19A) and PEG lipids (FIG. 19B) in NHP treated with LNP1 and LNP2 as described in the Examples.

[0051] FIG. 20 is a bar graph showing hepatic editing of TTR gene by LNP3 in NHPs as described in the Examples.

[0052] FIG. 21 is a plot showing serum TTR protein changes measured by ELISA in NHP treated with LNP3 as described in the Examples.

[0053] FIG. 22 is a plot showing serum TTR protein changes measured by liquid chromatography-mass spectrometry in NHP treated with LNP3 as described in the Examples.

[0054] FIGS. 23A and 23B are bar graphs showing serum Alanine Aminotransferase (ALT), FIG. 23A, and serum Aspartate Aminotransferase (AST), FIG. 23B, concentrations in NHP treated with LNP3 as described in the Examples.

[0055] FIGS. 24A and 24B are bar graphs showing serum Lactate Dehydrogenase (LDH), FIG. 24A, and serum Glutamate Dehydrogenase (GDH), FIG. 24B, concentrations in NHP treated with LNP3 as described in the Examples.

[0056] FIGS. 25A and 25B are bar graphs showing serum Gamma-Glutamyl Transferase (GGT), FIG. 25A, and serum Alkaline Phosphatase (AP), FIG. 25B, concentrations in NHP treated with LNP3 as described in the Examples.

[0057] FIG. 26 is a bar graph showing serum total bilirubin concentrations in NHP treated with LNP2 as described in the Examples.

[0058] FIG. 27 is a bar graph showing serum creatine kinase concentrations in NHP treated with LNP3 as described in the examples.

[0059] FIGS. 28A and 28B are plots of plasma pharmacokinetic profiles of iLipid (FIG. 28A) and PEG lipids (FIG. 28B) in NHP treated with LNP1 and LNP2 as described in the Examples.

[0060] FIG. 29 is a graph that shows percent base editing in primary human hepatocytes at various doses total RNA (ng/TA/ml) where GA521 was provided as the guide RNA. GA521 showed sustained base editing of greater than 40% in primary human hepatocytes.

### DETAILED DESCRIPTION OF ILLUSTRATIVE EMBODIMENTS

[0061] Provided herein are compositions for gene modification or editing and methods of using the same to treat or prevent conditions associated with the extracellular deposition in various tissues of amyloid fibrils formed by the aggregation of misfolded transthyretin (TTR) proteins. Such conditions include, but are not limited to, polyneuropathy due to hereditary transthyretin amyloidosis (hATTR-PN) and hereditary cardiomyopathy due to transthyretin amyloidosis (hATTR-CM), both associated with autosomal dominant mutations of the TTR gene, and an age-related cardiomyopathy associated with wild-type TTR proteins (ATTRwt), also known as senile cardiac amyloidosis. Compositions and methods directed to editing the TTR gene using an editing system such as one comprising a base editor and guide RNAs are disclosed.

### Definitions

[0062] The following presents definitions of some terms presented throughout this disclosure. In some instances, terms are defined in areas of this specification other than in this “Definitions” section.

[0063] As used in this specification and the appended claims, the singular forms “a,” “an,” and “the” include plural referents unless the content clearly dictates otherwise. It should also be noted that the term “or” is generally employed in its sense including “and/or” unless the content clearly dictates otherwise. The terms “and/or” and “any combination thereof” and their grammatical equivalents as used herein, can be used interchangeably. These terms can convey that any combination is specifically contemplated. Solely for illustrative purposes, the following phrases “A, B, and/or C” or “A, B, C, or any combination thereof” can mean “A individually; B individually; C individually; A and B; B and C; A and C; and A, B, and C.” The term “or” can be used conjunctively or disjunctively unless the context specifically refers to a disjunctive use.

[0064] The term “about” or “approximately” can mean within an acceptable error range for the particular value as determined by one of ordinary skill in the art, which will depend in part on how the value is measured or determined, i.e., the limitations of the measurement system. For example, “about” can mean within 1 or more than 1 standard deviation, per the practice in the art. Alternatively, “about” can mean a range of up to 20%, up to 10%, up to 5%, or up to 1% of a given value. Alternatively, particularly with respect to biological systems or processes, the term can mean within an order of magnitude, within 5-fold, and more preferably within 2-fold, of a value. Where particular values are described in the application and claims, unless otherwise stated, the term “about” means within an acceptable error range for the particular value should be assumed.

[0065] As used in this specification and claim(s), the words “comprising” (and any form of comprising, such as “comprise” and “comprises”), “having” (and any form of having, such as “have” and “has”), “including” (and any form of including, such as “includes” and “include”) or “containing” (and any form of containing, such as “contains” and “contain”) are inclusive or open-ended and do not exclude additional, unrecited elements or method steps. It is contemplated that any embodiment discussed in this specification can be implemented with respect to any method or composition of the present disclosure, and vice versa. Furthermore, compositions of the present disclosure can be used to achieve methods of the present disclosure.

[0066] An article, composition, method, or the like that comprises one or more elements may consist of the one or more elements or may consist essentially of the one or more elements. As used in this specification and claim(s), “consisting of” (and any form of consisting of, such as “consists of” and “consist of”) means including and limited to. As used in this specification and claim(s), an article, composition, method, or the like “consisting essentially of” (and any form of consisting essentially of, such as “consists essentially of” and “consist essentially of”) means the article, composition, method, or the like includes the specified enumerated elements; such as components, compounds, materials, steps, or the like, and may include additional elements that do not materially affect the basic and novel characteristics of the article, composition, method, or the like.

[0067] Reference in the specification to “some embodiments,” “an embodiment,” “one embodiment,” “embodiments” or “other embodiments” means that a particular feature, structure, or characteristic described in connection with the embodiments is included in at least some embodiments, but not necessarily all embodiments, of the present disclosures.

[0068] The words “preferred” and “preferably” refer to embodiments of the invention that may afford certain benefits, under certain circumstances. However, other embodiments may also be preferred, under the same or other circumstances. Furthermore, the recitation of one or more preferred embodiments does not imply that other embodiments are not useful and is not intended to exclude other embodiments from the scope of the invention.

[0069] The term “nucleic acid” as used herein refers to a polymer containing at least two nucleotides (i.e., deoxyribonucleotides or ribonucleotides) in either single- or double-stranded form and includes DNA and RNA. “Nucleotides” contain a sugar deoxyribose (DNA) or ribose (RNA), a base, and a phosphate group. Nucleotides are linked together through the phosphate groups. “Bases” include purines and pyrimidines, which further include natural compounds adenine, thymine, guanine, cytosine, uracil, inosine, and natural analogs, and synthetic derivatives of purines and pyrimidines, which include, but are not limited to, modifications which place new reactive groups such as, but not limited to, amines, alcohols, thiols, carboxylates, and alkylhalides. Nucleic acids include nucleic acids containing known nucleotide analogs or modified backbone residues or linkages or modified sugar residues, or non-canonical/chemically-modified nucleobases and combinations thereof, which are synthetic, naturally occurring, and non-naturally occurring, and which have similar binding properties as the reference nucleic acid. Examples of such analogs and/or modified residues include, without limitation, phosphorothioates, phosphoramidates, methyl phosphonates, chiral-methyl phosphonates, 2′-O-methyl ribonucleotides, and peptide-nucleic acids (PNAs).

[0070] The term “nucleic acid” includes any oligonucleotide or polynucleotide, with fragments containing up to 60 nucleotides generally termed oligonucleotides, and longer fragments termed polynucleotides. A deoxyribooligonucleotide consists of a 5-carbon sugar called deoxyribose joined covalently to phosphate at the 5′ and 3′ carbons of this sugar to form an alternating, unbranched polymer. DNA may be in the form of, e.g., antisense molecules, plasmid DNA, pre-condensed DNA, a PCR product, vectors, expression cassettes, chimeric sequences, chromosomal DNA, or derivatives and combinations of these groups. A ribooligonucleotide consists of a similar repeating structure where the 5-carbon sugar is ribose. Accordingly, the terms “polynucleotide” and “oligonucleotide” can refer to a polymer or oligomer of nucleotide or nucleoside monomers consisting of naturally-occurring bases, sugars and intersugar (backbone) linkages. The terms “polynucleotide” and “oligonucleotide” can also include polymers or oligomers comprising non-naturally occurring monomers, or portions thereof, which function similarly. Such modified or substituted oligonucleotides are often preferred over native forms because of properties such as, for example, enhanced cellular uptake, reduced immunogenicity, and increased stability in the presence of nucleases. It should be understood that the terms “polynucleotide” and “oligonucleotide” can also include polymers or oligomers comprising both deoxy and ribonucleotide combinations or variants thereof in combination with backbone modifications, such as those described herein.

[0071] The “nucleic acid” described herein may include one or more nucleotide variants, including nonstandard nucleotide(s), non-natural nucleotide(s), nucleotide analog(s), and/or modified nucleotides. Examples of modified nucleotides include, but are not limited to diaminopurine, 5-fluorouracil, 5-bromouracil, 5-chlorouracil, 5-iodouracil, hypoxanthine, xantine, 4-acetylcytosine, 5-(carboxyhydroxylmethyl) uracil, 5-carboxymethylaminomethyl-2-thiouridine, 5-carboxymethylaminomethyluracil, dihydrouracil, beta-D-galactosylqueosine, inosine, N6-isopentenyladenine, 1-methylguanine, 1-methylinosine, 2,2-dimethylguanine, 2-methyladenine, 2-methylguanine, 3-methylcytosine, 5-methylcytosine, N6-adenine, 7-methylguanine, 5-methylaminomethyluracil, 5-methoxyaminomethyl-2-thiouracil, beta-D-mannosylqueosine, 5′-methoxycarboxymethyluracil, 5-methoxyuracil, 2-methylthio-N6-isopentenyladenine, uracil-5-oxyacetic acid (v), wybutoxosine, pseudouracil, queosine, 2-thiocytosine, 5-methyl-2-thiouracil, 2-thiouracil, 4-thiouracil, 5-methyluracil, uracil-5-oxyacetic acid methylester, 5-methyl-2-thiouracil, 3-(3-amino-3-N-2-carboxypropyl) uracil, (acp3)w, 2,6-diaminopurine and the like. In some cases, nucleotides may include modifications in their phosphate moieties, including modifications to a triphosphate moiety. Non-limiting examples of such modifications include phosphate chains of greater length (e.g., a phosphate chain having, 4, 5, 6, 7, 8, 9, 10 or more phosphate moieties) and modifications with thiol moieties (e.g., alpha-thiotriphosphate and beta-thiotriphosphates).

[0072] The nucleic acid described herein may be modified at the base moiety (e.g., at one or more atoms that typically are available to form a hydrogen bond with a complementary nucleotide and/or at one or more atoms that are not typically capable of forming a hydrogen bond with a complementary nucleotide), sugar moiety, or phosphate backbone. Backbone modifications can include, but are not limited to, a phosphorothioate, a phosphorodithioate, a phosphoroselenoate, a phosphorodiselenoate, a phosphoroanilothioate, a phosphoraniladate, a phosphoramidate, and a phosphorodiamidate linkage. A phosphorothioate linkage substitutes a sulfur atom for a non-bridging oxygen in the phosphate backbone and delay nuclease degradation of oligonucleotides. A phosphorodiamidate linkage (N3′→P5′) prevents nuclease recognition and degradation. Backbone modifications can also include peptide bonds instead of phosphorous in the backbone structure (e.g., N-(2-aminoethyl)-glycine units linked by peptide bonds in a peptide nucleic acid), or linking groups including carbamate, amides, and linear and cyclic hydrocarbon groups. Oligonucleotides with modified backbones are reviewed in Micklefield, Curr. Med. Chem., 8 (10): 1157-79, 2001 and Lyer et al., Curr. Opin. Mol. Ther., 1 (3): 344-358, 1999. Nucleic acid molecules described herein may contain a sugar moiety that comprises ribose or deoxyribose, as present in naturally occurring nucleotides, or a modified sugar moiety or sugar analog. Modified sugar moieties include, but are not limited to, 2′-O-methyl, 2′-O-methoxyethyl, 2′-O-aminoethyl, 2′-Flouro, N3′→P5′ phosphoramidate, 2′dimethylaminooxyethoxy, 2′ 2′dimethylaminoethoxyethoxy, 2′-guanidinium, 2′-O-guanidinium ethyl, carbamate modified sugars, and bicyclic modified sugars. 2′-O-methyl or 2′-O-methoxyethyl modifications promote the A-form or RNA-like conformation in oligonucleotides, increase binding affinity to RNA, and have enhanced nuclease resistance. Modified sugar moieties can also include having an extra bridge bond (e.g., a methylene bridge joining the 2′-O and 4′-C atoms of the ribose in a locked nucleic acid) or sugar analog such as a morpholine ring (e.g., as in a phosphorodiamidate morpholino).

[0073] Unless otherwise indicated, a particular nucleic acid sequence also implicitly encompasses conservatively modified variants thereof (e.g., degenerate codon substitutions), alleles, orthologs, SNPs, and complementary sequences as well as the sequence explicitly indicated. Specifically, degenerate codon substitutions may be achieved by generating sequences in which the third position of one or more selected (or all) codons is substituted with mixed-base and/or deoxyinosine residues (Batzer et al., Nucleic Acid Res., 19:5081 (1991); Ohtsuka et al., J. Biol. Chem., 260:2605-2608 (1985); Rossolini et al., Mol. Cell. Probes, 8:91-98 (1994)).

[0074] The present disclosure encompasses isolated or substantially purified nucleic acid molecules and compositions containing those molecules. As used herein, an “isolated” or “purified” DNA molecule or RNA molecule is a DNA molecule or RNA molecule that exists apart from its native environment. An isolated DNA molecule or RNA molecule may exist in a purified form or may exist in a non-native environment such as, for example, a transgenic host cell. For example, an “isolated” or “purified” nucleic acid molecule or biologically active portion thereof, is substantially free of other cellular material, or culture medium when produced by recombinant techniques, or substantially free of chemical precursors or other chemicals when chemically synthesized. In one embodiment, an “isolated” nucleic acid is free of sequences that naturally flank the nucleic acid (i.e., sequences located at the 5′ and 3′ ends of the nucleic acid) in the genomic DNA of the organism from which the nucleic acid is derived.

[0075] As used herein, the terms “protein,” “polypeptide,” and “peptide” are used interchangeably and refer to a polymer of amino acid residues linked via peptide bonds and which may be composed of two or more polypeptide chains. The terms “polypeptide,” “protein,” and “peptide” refer to a polymer of at least two amino acid monomers joined together through amide bonds. An amino acid may be the L-optical isomer or the D-optical isomer. More specifically, the terms “polypeptide,” “protein,” and “peptide” refer to a molecule composed of two or more amino acids in a specific order; for example, the order as determined by the base sequence of nucleotides in the gene or RNA coding for the protein. Proteins are essential for the structure, function, and regulation of the body's cells, tissues, and organs, and each protein has unique functions. Examples are hormones, enzymes, antibodies, and any fragments thereof. In some cases, a protein can be a portion of the protein, for example, a domain, a subdomain, or a motif of the protein. In some cases, a protein can be a variant (or mutation) of the protein, wherein one or more amino acid residues are inserted into, deleted from, and/or substituted into the naturally occurring (or at least a known) amino acid sequence of the protein. A protein or a variant thereof can be naturally occurring or recombinant. Methods for detection and/or measurement of polypeptides in biological material are well known in the art and include, but are not limited to, Western-blotting, flow cytometry, ELISAs, RIAs, and various proteomics techniques. An exemplary method to measure or detect a polypeptide is an immunoassay, such as an ELISA. This type of protein quantitation can be based on an antibody capable of capturing a specific antigen, and a second antibody capable of detecting the captured antigen.

[0076] The term “subject” or “patient” encompasses mammals. Examples of mammals include, but are not limited to, any member of the mammalian class: humans, non-human primates such as chimpanzees, and other apes and monkey species; farm animals such as cattle, horses, sheep, goats, swine; domestic animals such as rabbits, dogs, and cats; laboratory animals including rodents, such as rats, mice and guinea pigs, and the like.

[0077] “A subject in need thereof” refers to an individual who has a disease, a symptom of the disease, or a predisposition toward the disease, with the purpose to cure, heal, alleviate, relieve, alter, remedy, ameliorate, improve, or affect the disease, the symptom of the disease, or the predisposition toward the disease. In some embodiments, the subject has hereditary transthyretin amyloidosis (hATTR). In some embodiments, the subject has cardiomyopathy due to transthyretin amyloidosis (ATTR-CM). In some embodiments, the subject has polyneuropathy due to transthyretin amyloidosis (ATTR-PN). In some embodiments, the subject has wild-type ATTR (ATTRwt), the age-related deposition of wild type TTR protein (formerly known as senile amyloidosis).

[0078] “Administering” and its grammatical equivalents as used herein can refer to providing one or more replication competent recombinant adenovirus or pharmaceutical compositions described herein to a subject or a patient. By way of example and without limitation, “administering” can be performed by intravenous (i.v.) injection, sub-cutaneous (s.c.) injection, intradermal (i.d.) injection, intraperitoneal (i.p.) injection, intramuscular (i.m.) injection, intravascular injection, intracerebroventricular (i.c.v.) injection, intrathecal (i.t.) injection, infusion (inf.), oral routes (p.o.), topical (top.) administration, or rectal (p.r.) administration. One or more such routes can be employed.

[0079] The term “parenteral” as used herein includes subcutaneous, intracutaneous, intravenous, intramuscular, intraarticular, intraarterial, intrasynovial, intrasternal, intracerebroventricular, intrathecal, intralesional, and intracranial injection or infusion techniques. Parenteral administration can be, for example, by bolus injection or by gradual perfusion over time. In addition, it can be administered to the subject via injectable depot routes of administration such as using 1-, 3-, or 6-month depot injectable or biodegradable materials and methods.

[0080] The terms “treat,” “treating,” or “treatment,” and its grammatical equivalents as used herein, can include alleviating, abating, or ameliorating at least one symptom of a disease or a condition, preventing additional symptoms, inhibiting the disease or the condition, e.g., arresting the development of the disease or the condition, relieving the disease or the condition, causing regression of the disease or the condition, relieving a condition caused by the disease or the condition, or stopping the symptoms of the disease or the condition either prophylactically and/or therapeutically. “Treating” may refer to administration of a composition comprising a nanoparticle, such as a lipid nanoparticle (LNP), to a subject after the onset, or suspected onset, of a disease or condition. “Treating” includes the concepts of “alleviating,” which refers to lessening the frequency of occurrence or recurrence, or the severity, of any symptoms or other ill effects related to a disease or condition and/or the side effects associated with the disease or condition. The term “treating” also encompasses the concept of “managing” which refers to reducing the severity of a particular disease or disorder in a patient or delaying its recurrence, e.g., lengthening the period of remission in a patient who had suffered from the disease. The term “treating” further encompasses the concept of “prevent,” “preventing,” and “prevention.” It is appreciated that, although not precluded, treating a disorder or condition does not require that the disorder, condition, or symptoms associated therewith be completely eliminated.

[0081] As used herein, the terms “prevent,” “preventing,” “prevention,” and the like, refer to reducing the probability of developing a disease or condition in a subject, who does not have, but is at risk of or susceptible to developing a disease or condition.

[0082] The term “ameliorate” as used herein can refer to decrease, suppress, attenuate, diminish, arrest, or stabilize the development or progression of a disease.

[0083] As used therein, “delaying” the development of a disease means to defer, hinder, slow, retard, stabilize, and/or postpone progression of the disease. This delay can be of varying lengths of time, depending on the history of the disease and/or individuals being treated. A method that “delays” or alleviates the development of a disease, or delays the onset of the disease, is a method that reduces probability of developing one or more symptoms of the disease in a given time frame and/or reduces extent of the symptoms in a given time frame, when compared to not using the method. Such comparisons are typically based on clinical studies, using a number of subjects sufficient to give a statistically significant result.

[0084] “Development” or “progression” of a disease means initial manifestations and/or ensuing progression of the disease. Development of the disease can be detectable and assessed using standard clinical techniques as well known in the art. However, development also refers to progression that may be undetectable. For purpose of this disclosure, development or progression refers to the biological course of the symptoms. “Development” includes occurrence, recurrence, and onset.

[0085] As used herein “onset” or “occurrence” of a disease includes initial onset and/or recurrence.

[0086] The term “therapeutic agent” can refer to any agent that, when administered to a subject, has a therapeutic, diagnostic, and/or prophylactic effect and/or elicits a desired biological and/or pharmacological effect. Therapeutic agents can also be referred to as “actives” or “active agents.” Such agents include, but are not limited to, cytotoxins, radioactive ions, chemotherapeutic agents, small molecule drugs, proteins, and nucleic acids.

[0087] The terms “pharmaceutical composition” and its grammatical equivalents as used herein can refer to a mixture or solution comprising a therapeutically effective amount of an active pharmaceutical ingredient together with one or more pharmaceutically acceptable excipients, carriers, and/or a therapeutic agent to be administered to a subject, e.g., a human in need thereof.

[0088] The term “pharmaceutically acceptable” and its grammatical equivalents as used herein can refer to an attribute of a material which is useful in preparing a pharmaceutical composition that is generally safe, non-toxic, and neither biologically nor otherwise undesirable and is acceptable for veterinary as well as human pharmaceutical use. “Pharmaceutically acceptable” can refer to a material, such as a carrier or diluent, which does not abrogate the biological activity or properties of the compound, and is relatively nontoxic, i.e., the material may be administered to a subject without causing undesirable biological effects or interacting in a deleterious manner with any of the components of the pharmaceutical composition in which it is contained.

[0089] A “pharmaceutically acceptable excipient, carrier, or diluent” refers to an excipient, carrier, or diluent that can be administered to a subject, together with an agent, and which does not destroy the pharmacological activity thereof and is nontoxic when administered in doses sufficient to deliver a therapeutic amount of the agent.

[0090] A “pharmaceutically acceptable salt” may be an acid or base salt that is generally considered in the art to be suitable for use in contact with the tissues of human beings or animals without excessive toxicity, irritation, allergic response, or other problem or complication. Those of ordinary skill in the art will recognize from this disclosure and the knowledge in the art that further pharmaceutically acceptable salts include those listed by Remington's Pharmaceutical Sciences, 17th ed., Mack Publishing Company, Easton, PA, p. 1418 (1985).

[0091] As used herein, the term “therapeutically effective amount” means an amount of an agent to be delivered (e.g., nucleic acid, drug, payload, composition, therapeutic agent, diagnostic agent, prophylactic agent, etc.) that is sufficient, when administered to a subject suffering from or susceptible to an infection, disease, disorder, and/or condition, to treat, improve symptoms of, diagnose, prevent, and/or delay the onset of the infection, disease, disorder, and/or condition.

[0092] Ranges provided herein are understood to be shorthand for all of the values within the range. For example, a range of 1 to 50 is understood to include any number, combination of numbers, or sub-range from the group consisting of 1, 2, 3, 4, 5, 6, 7, 8, 9, 10, 11, 12, 13, 14, 15, 16, 17, 18, 19, 20, 21, 22, 23, 24, 25, 26, 27, 28, 29, 30, 31, 32, 33, 34, 35, 36, 37, 38, 39, 40, 41, 42, 43, 44, 45, 46, 47, 48, 49, or 50, as well as all intervening decimal values between the aforementioned integers such as, for example, 1.1, 1.2, 1.3, 1.4, 1.5, 1.6, 1.7, 1.8, and 1.9. With respect to sub-ranges, “nested sub-ranges” that extend from either end point of the range are specifically contemplated. For example, a nested sub-range of an exemplary range of 1 to 50 may comprise 1 to 10, 1 to 20, 1 to 30, and 1 to 40 in one direction, or 50 to 40, 50 to 30, 50 to 20, and 50 to 10 in the other direction.

[0093] Numbers expressing quantities of components, molecular weights, and so forth used in the specification and claims are to be understood as being modified in all instances by the term “about.” Accordingly, unless otherwise indicated to the contrary, the numerical parameters set forth in the specification and claims are approximations that may vary depending upon the desired properties sought to be obtained by the present invention. At the very least, and not as an attempt to limit the doctrine of equivalents to the scope of the claims, each numerical parameter should at least be construed in light of the number of reported significant digits and by applying ordinary rounding techniques.

[0094] Notwithstanding that the numerical ranges and parameters setting forth the broad scope of the invention are approximations, the numerical values set forth in the specific examples are reported as precisely as possible. All numerical values, however, inherently contain a range necessarily resulting from the standard deviation found in their respective testing measurements.

[0095] As used herein, a spacer sequence of a guide nucleic acid is considered to be “homologous” to a protospacer sequence of a target nucleic acid if a base editor of a base editor system comprising the spacer sequence is capable of making a modification to a base within the target nucleic acid. A spacer sequence that is homologous to a protospacer sequence may be identical or substantially identical to the protospacer sequence.

[0096] As used herein, a nucleic acid sequence that is “substantially identical” to another nucleic acid sequence is a nucleotide sequence that has 70% or more sequence identity to the other nucleic acid sequence.

[0097] For purposes of percent sequence identity between an RNA sequence (e.g., spacer) and a DNA sequence (e.g., target gene protospacer), uracil bases in the RNA are to be considered identical to thymine bases in DNA sequences.

[0098] As used herein “sequence identity” refers to the extent to which two optimally aligned nucleic acid sequences are invariant throughout a window of alignment of components, e.g., nucleotides. “Identity” can be readily calculated by known methods including, but not limited to, those described in: Computational Molecular Biology (Lesk, A. M., ed.) Oxford University Press, New York (1988); Biocomputing: Informatics and Genome Projects (Smith, D. W., ed.) Academic Press, New York (1993); Computer Analysis of Sequence Data, Part I (Griffin, A. M., and Griffin, H. G., eds.) Humana Press, New Jersey (1994); Sequence Analysis in Molecular Biology (von Heinje, G., ed.) Academic Press (1987); and Sequence Analysis Primer (Gribskov, M. and Devereux, J., eds.) Stockton Press, New York (1991).

[0099] As used herein, the term “percent sequence identity” or “percent identity” refers to the percentage of identical nucleotides in a linear polynucleotide sequence of a reference (“query”) nucleic acid (or its complementary strand) as compared to a test (“subject”) nucleic acid (or its complementary strand) when the two sequences are optimally aligned. Percent sequence identity may be determined, when the compared sequences are aligned for maximum correspondence, as measured using a sequence comparison algorithm described below and as known in the art, or by visual inspection.

[0100] For sequence comparison, typically one sequence acts as a reference sequence to which test sequences are compared. When using a sequence comparison algorithm, test and reference sequences are entered into a computer, subsequence coordinates are designated if necessary, and sequence algorithm program parameters are designated. The sequence comparison algorithm then calculates the percent sequence identity for the test sequence(s) relative to the reference sequence, based on the designated program parameters. Optimal alignment of sequences for aligning a comparison window are well known to those skilled in the art and may be conducted by tools such as the local homology algorithm of Smith and Waterman, the homology alignment algorithm of Needleman and Wunsch, the search for similarity method of Pearson and Lipman, and optionally by computerized implementations of these algorithms such as GAP, BESTFIT, FASTA, and TFASTA available as part of the GCGR Wisconsin Package® (Accelrys Inc., San Diego, CA). An “identity fraction” for aligned segments of a test sequence and a reference sequence is the number of identical components which are shared by the two aligned sequences divided by the total number of components in the reference sequence segment, i.e., the entire reference sequence or a smaller defined part of the reference sequence. Percent sequence identity is represented as the identity fraction multiplied by 100.

[0101] “Percent identity” may also be determined using BLASTX version 2.0 for translated nucleotide sequences and BLASTN version 2.0 for polynucleotide sequences. Software for performing BLAST analyses is publicly available through the National Center for Biotechnology Information. This algorithm involves first identifying high scoring sequence pairs (HSPs) by identifying short words of length W in the query sequence, which either match or satisfy some positive-valued threshold score T when aligned with a word of the same length in a database sequence. T is referred to as the neighborhood word score threshold (Altschul et al., 1990). These initial neighborhood word hits act as seeds for initiating searches to find longer HSPs containing them. The word hits are then extended in both directions along each sequence for as far as the cumulative alignment score can be increased. Cumulative scores are calculated using, for nucleotide sequences, the parameters M (reward score for a pair of matching residues; always >0) and N (penalty score for mismatching residues; always <0). Extension of the word hits in each direction are halted when the cumulative alignment score falls off by the quantity X from its maximum achieved value, the cumulative score goes to zero or below due to the accumulation of one or more negative-scoring residue alignments, or the end of either sequence is reached. The BLAST algorithm parameters W, T, and X determine the sensitivity and speed of the alignment. The BLASTN program (for nucleotide sequences) uses as defaults a word length (W) of 11, an expectation (E) of 10, a cutoff of 100, M=5, N=−4, and a comparison of both strands.

[0102] In addition to calculating percent sequence identity, the BLAST algorithm also performs a statistical analysis of the similarity between two sequences (see, e.g., Karlin & Altschul, Proc. Nat'l. Acad. Sci. USA 90:5873-5787 (1993)). One measure of similarity provided by the BLAST algorithm is the smallest sum probability (P(N)), which provides an indication of the probability by which a match between two nucleotide or amino acid sequences would occur by chance. For example, a test nucleic acid sequence is considered similar to a reference sequence if the smallest sum probability in a comparison of the test nucleotide sequence to the reference nucleotide sequence is less than about 0.1 to less than about 0.001.

[0103] In some embodiments, a first nucleotide sequence that is homologous to a second nucleotide sequence may hybridize to the complimentary sequence of the second nucleotide sequence under stringent conditions or highly stringent conditions. “Stringent hybridization conditions” and “stringent hybridization wash conditions” in the context of nucleic acid hybridization are sequence dependent and are different under different environmental parameters. An extensive guide to the hybridization of nucleic acids is found in Tijssen, Laboratory Techniques in Biochemistry and Molecular Biology-Hybridization with Nucleic Acid Probes part I chapter 2 “Overview of principles of hybridization and the strategy of nucleic acid probe assays” Elsevier, New York (1993). Generally, highly stringent hybridization and wash conditions are selected to be about 5° C. lower than the thermal melting point (Tm) for the specific sequence at a defined ionic strength and pH. The Tm is the temperature (under defined ionic strength and pH) at which 50% of the target sequence hybridizes to a perfectly matched probe. Very stringent conditions are selected to be equal to the Tm for a particular probe. An example of stringent hybridization conditions for hybridization of complementary nucleotide sequences which have more than 100 complementary residues on a filter in a Southern or Northern blot is 50% formamide with 1 mg of heparin at 42° C., with the hybridization being carried out overnight. An example of highly stringent wash conditions is 0.15M NaCl at 72° C. for about 15 minutes. An example of stringent wash conditions is a 0.2×SSC wash at 65° C. for 15 minutes (see, Sambrook and Russel, Molecular Cloning: A laboratory Manual, 3^{rd} ed., Cold Spring Harbor Laboratory Press, 2001 for a description of SSC buffer). Often, a high stringency wash is preceded by a low stringency wash to remove background probe signal. An example of a medium stringency wash for a duplex of, e.g., more than 100 nucleotides, is 1×SSC at 45° C. for 15 minutes. An example of a low stringency wash for a duplex of, e.g., more than 100 nucleotides, is 4-6×SSC at 40° C. for 15 minutes. For short probes (e.g., about 10 to 50 nucleotides), stringent conditions typically involve salt concentrations of less than about 1.0 M Na ion, typically about 0.01 to 1.0 M Na ion concentration (or other salts) at pH 7.0 to 8.3, and the temperature is typically at least about 30° C. Stringent conditions can also be achieved with the addition of destabilizing agents such as formamide.

[0104] In several places throughout the application, guidance is provided through examples, which examples, including the particular aspects thereof, can be used in various combinations and be the subject of claims. In each instance, the recited list serves only as a representative group and should not be interpreted as an exclusive list. It is to be understood that the particular examples, materials, amounts, and procedures are to be interpreted broadly in accordance with the scope and spirit of the invention as set forth herein.

[0105] For any method disclosed herein that includes discrete steps, the steps may be conducted in any feasible order. And, as appropriate, any combination of two or more steps may be conducted simultaneously.

[0106] All headings throughout are for the convenience of the reader and should not be used to limit the meaning of the text that follows the heading, unless so specified.

### Transthyretin Protein and Gene

[0107] Transthyretin (TTR), originally known as prealbumin, is a 55-kDa transport protein for both thyroxine (T4) and retinol-binding protein, that circulates in soluble form in the serum and cerebrospinal fluid (CSF) of healthy humans. TTR is understood to be primarily synthesized in the liver. Under normal conditions, TTR circulates as a homotetramer with a central channel. The wild-type TTR monomer is 147 amino acids in length and has the amino acid sequence below:

(SEQ ID NO: 23)
MASHRLLLLC LAGLVFVSEA GPTGTGESKC PLMVKVLDAV RGSPAINVAV
HVFRKAADDT WEPFASGKTS ESGELHGLTT EEEFVEGIYK VEIDTKSYWK
ALGISPFHEH AEVVFTANDS GPRRYTIAAL LSPYSYSTTA VVTNPKE.

[0108] The TTR gene, composed of four exons, is located on chromosome 18 at 18q12.1. The full sequence of the human TTR gene is shown in FIG. 4 and is also available at UniProtKB—P02766 (TTHY_HUMAN). Over 120 TTR variants have so far been identified, the great majority of which are pathogenic. The most common pathogenic variant consists of a point mutation leading to replacement of valine by methionine at position 30 of the mature protein. This Val30Met mutation is responsible for hATTR amyloidosis and is the most frequent amyloidogenic mutation worldwide, accounting for about 50% of TTR variants.

[0109] Hereditary transthyretin amyloidosis (hATTR) is a disease caused by mutations in the TTR gene. Autosomal dominant mutations destabilize the TTR tetramer and enhance dissociation into monomers, resulting in misfolding, aggregation, and the subsequent extracellular deposition of TTR amyloid fibrils in different tissue sites. This multisystem extracellular deposition of amyloid (amyloidosis) results in dysfunction of different organs and tissues. In particular, polyneuropathy due to transthyretin amyloidosis (ATTR-PN) and cardiomyopathy due to transthyretin amyloidosis (ATTR-CM) are severe disorders associated with significant morbidity and mortality.

[0110] When there is clinical suspicion for hATTR-PN, diagnosis is typically done by tissue biopsy with staining for amyloid, amyloid typing (using immunohistochemistry or mass spectrometry), and/or TTR gene sequencing. When there is clinical suspicion for ATTR-CM, the key diagnostic tools are either endomyocardial biopsy (with tissue staining and amyloid typing by immunohistochemistry or mass spectrometry) or 99mtechnetium-pyrophosphate scan. Both of these approaches can provide a diagnosis of ATTR-CM. TTR gene sequencing can be used to differentiate between the hATTR-CM (mutation positive) and ATTRwt-CM (mutation negative).

[0111] The compositions described herein include a spacer having a nucleotide sequence that functions as a guide to direct a gene editing protein (e.g., a base editor) to alter the TTR gene, for example by introducing one or more nucleobase alterations in the TTR gene. These point mutations may be used to disrupt gene function, by the introduction of a missense mutation(s) that results in production of a less functional, or non-functional protein, thus silencing the TTR gene. Alternatively, it is contemplated herein that corrections to one or more point mutation(s) may be made using a gene editing protein to alter a mutated gene to correct the underlying mutation causing the dysfunction in the TTR gene or otherwise mitigate against dysfunction of the gene.

### Gene Editing/Gene Modification

[0112] The term “gene editing” or “gene modification” and its grammatical equivalents as used herein refers to genetic engineering in which one or more nucleotides are inserted, replaced, or removed from a genome. Gene editing can be performed using a nuclease (e.g., a natural-existing nuclease or an artificially engineered nuclease). Gene modification can include introducing a double stranded break, a non-sense mutation, a frameshift mutation, a splice site alteration, or an inversion in a polynucleotide sequence, e.g., a target polynucleotide sequence. FIG. 1A depicts a crispr Cas9 protein which is an RNA-guided endonuclease that can be used to impart a double-stranded break at a site-specific location in DNA or a gene. Gene modification can also be accomplished using other editors, such as base editors.

### Base Editors

[0113] A base editor (BE) or nucleobase editor (NBE) refers to an agent comprising a polypeptide that is capable of making a modification to a base (e.g., A, T, C, G, or U) within a nucleic acid sequence (e.g., DNA or RNA). A base editor may comprise a macromolecule or macromolecular complex that is capable of converting a nucleobase in a polynucleic acid sequence into another nucleobase (e.g., a transition or transversion) in one location or two or more locations within a base editing window. A base editor may comprise a combination of (a) a nucleotide-, nucleoside-, or nucleobase-converting enzyme and (b) a nucleic acid binding protein that can be programmed to bind to a specific nucleic acid sequence. The nucleic acid binding protein may be catalytically inactivated or impaired such that it does not cleave a single stranded nucleic acid target or such that it nicks or cleaves at most one strand of a double stranded nucleic acid target.

[0114] A base editor may comprise a polynucleotide programmable DNA binding domain fused or linked to a domain having base editing activity, resulting in a base editor fusion protein. The base editor fusion protein may comprise one or more linkers, for example, peptide linkers between the domains. In some embodiments, the domain having base editing activity is linked to the guide RNA (e.g., via an RNA binding motif on the guide RNA and an RNA binding domain fused to the deaminase).

[0115] In some embodiments, a base editor is a class of modular programmable proteins comprising a deaminase domain fused to a catalytically impaired CRISPR-Cas enzyme. Adenine base editors (ABEs) convert A:T to G:C base pairs and cytosine base editors (CBEs) convert C:G to T:A base pairs, through hydrolytic deamination and subsequent cellular processing without generating double-stranded DNA breaks. The respective deaminases of base editors are directed to the site of interest by a guide RNA (gRNA) within the D10A nickase Cas9 (nCas9). Cytidine deaminase enzyme of a CBE directs conversion of cytosine to uridine, thereby effecting a C→T (or G→A) substitution (see FIG. 1B). “Cytidine deaminase” is used herein to refer to a deaminase enzyme that acts on deoxycytidine, on cytidine, or both on deoxycytidine and on cytidine to convert cytosine to uridine. Cytidine deaminase and cytosine deaminase may be used interchangeably herein. Where the goal is to disrupt a gene in vivo for a therapeutic purpose, cytosine base editors (CBE) are capable of potentially being able to directly introduce stop codons into the coding sequence of the gene (nonsense mutations) by altering specific codons for glutamine (CAG→TAG, CAA→TAA), arginine (CGA→TGA), and tryptophan (TGG→TAG/TAA/TGA, with editing of cytosines on the antisense strand).

[0116] In comparison, the adenosine deaminase enzyme of an ABE directs conversion of adenosine to inosine, thereby effecting a A→G (or T→C) substitution (see FIG. 1B). “Adenosine deaminase” is used herein to refer to a deaminase enzyme that acts on deoxyadenosine, on adenosine, or both on deoxyadenosine and on adenosine to convert adenine to hypoxanthine or, alternatively, adenosine to inosine. Because the structure of inosine is the similar to guanosine (inosine does not include an exocyclic amino group of guanosine), inosine tends to behave as guanosine. Inosine is eventually replaced by guanosine through subsequent cellular processing. Accordingly, adenosine deaminase effects an A→G (or T→C) substitution. Adenosine deaminase and adenine deaminase may be used interchangeably herein. Adenine base editors (ABE) cannot directly introduce stop codons, as there are no A→G changes that result in nonsense mutations.

[0117] Adenine base editors can be used, for example, to disrupt gene function by editing the start codon, from either ATG→GTG or ATG→ACG. A second strategy by which adenine base editors can disrupt gene function is by editing splice sites, whether splice donors at the 5′ ends of introns or splice acceptors at the 3′ ends of introns. Splice site disruption can result in the inclusion of intronic sequences in messenger RNA (mRNA), potentially introducing nonsense, frameshift, or in-frame mutations that result in premature stop codons or in insertion/deletion of amino acids that disrupt protein activity, or in the exclusion of exonic sequences, potentially introducing nonsense, frameshift, or in-frame indel mutations.

[0118] As shown in FIG. 2, canonical splice donors comprise the DNA sequence GT on the sense strand, whereas canonical splice acceptors comprise the DNA sequence AG. Alteration of the sequence disrupts normal splicing. Splice donors can be disrupted by adenine base editing of the complementary base in the second position in the antisense strand (GT→GC), and splice acceptors can be disrupted by adenine base editing of the first position in the sense strand (AG→GG).

[0119] Adenine base editors (ABE) include, but are not limited to, ABE8.8 (Gaudelli et al., Nat Biotechnol. 2020 July; 38 (7): 892-900. doi: 10.1038/s41587-020-0491-6. Epub 2020 Apr. 13)).

[0120] In embodiments, an adenine base editor is encoded by mRNA comprising the sequence of MA004 mRNA shown in Table 11. In embodiments, the adenine base editor is encoded by mRNA comprising a sequence having 50% or more sequence identity to MA004 mRNA shown in Table 11, 60% or more sequence identity to MA004 mRNA shown in Table 11, 70% or more sequence identity to MA004 mRNA shown in Table 11, 75% or more sequence identity to MA004 mRNA shown in Table 11, 80% or more sequence identity to MA004 mRNA shown in Table 11, 85% or more sequence identity to MA004 mRNA shown in Table 11, 90% or more sequence identity to MA004 mRNA shown in Table 11, 95% or more sequence identity to MA004 mRNA shown in Table 11, 96% or more sequence identity to MA004 mRNA shown in Table 11, 97% or more sequence identity to MA004 mRNA shown in Table 11, 98% or more sequence identity to MA004 mRNA shown in Table 11, or 99% or more sequence identity to MA004 mRNA shown in Table 11.

[0121] ABE7.10 (Gaudelli et al., Nature. 2017 Nov. 23; 551(7681):464-471. doi: 10.1038/nature24644), and other ABE variants containing Streptococcus pyogenes Cas9. The CRISPR Journal, Volume 4, Number 2, 2021 pp. 169-177 and Supplementary Figures S1-s9, Supplementary Data S4-S6, and Supplementary Table S1-S2 discloses additional inlaid base editors (IBEs) variants.

[0122] In some embodiments, a base editor may convert C:G to G:C base pairs. Examples of such base editors are disclosed in (a) Chen et al. Programmable C:G to G:C genome editing with CRISPR-Cas9-directed base excision repair proteins. Nat Commun 12, 1384 (2021). doi:10.1038/s41467-021-21559-9. Epub 2021-March-02; (b) Kurt, I. C., Zhou, R., Iyer, S. et al. CRISPR C-to-G base editors for inducing targeted DNA transversions in human cells. Nat Biotechnol 39, 41-46 (2021). doi: 10.1038/s41587-020-0609-x. Epub 2020-July-20; and (c) Zhao, D., Li, J., Li, S. et al. Glycosylase base editors enable C-to-A and C-to-G base changes. Nat Biotechnol 39, 35-40 (2021). doi: 10.1038/s41587-020-0592-2. Epub 2020-July-20. Such base editors may comprise a Cas9 nickase and a cytidine deaminase. Such base editors may further comprise a uracil-DNA glycosylase, a DNA repair protein such as XRCC1, DNA ligase S, or DNA binding and ligase domains of DNA polymerase β.

[0123] In some embodiments, a base editor may convert C:G to A:T base pairs. An example of such a base editor is disclosed in Zhao, D., Li, J., Li, S. et al. Glycosylase base editors enable C-to-A and C-to-G base changes. Nat Biotechnol 39, 35-40 (2021). doi: 10.1038/s41587-020-0592-2. Epub 2020-July-20. Such base editors may comprise a Cas9 nickase and a cytidine deaminase. Such base editors may further comprise a uracil-DNA glycosylase.

[0124] The term “base editor system” refers to a system for editing a nucleobase of a target nucleotide sequence. In various embodiments, the base editor system comprises (1) a polynucleotide programmable nucleotide binding domain (e.g., Cas9); (2) a deaminase domain (e.g., an adenosine deaminase or a cytidine deaminase) for deaminating said nucleobase; and (3) one or more guide polynucleotide (e.g., guide RNA). In some embodiments, the base editor system comprises a base editor fusion protein comprising (1) and (2), or a polynucleotide (e.g., mRNA) encoding the base editor fusion protein comprising (1) and (2). In some embodiments, the polynucleotide programmable nucleotide binding domain is a polynucleotide programmable DNA binding domain. In some embodiments, the base editor is an adenine or adenosine base editor (ABE). In some embodiments, the base editor is a cytosine base editor (CBE).

[0125] Genome-editing systems include clustered regularly interspaced short palindromic repeats (CRISPR)/Cas system. Exemplary guide nucleotide sequence-programmable DNA-binding proteins include, but are not limited to, Cas9 (e.g., dCas9 and nCas9), saCas9 (e.g., saCas9d, saCas9d, saKKH Cas9) CasX, CasY, Cpf1, C2c1, C2c2, C2c3, Argonaute, and any other suitable protein described herein, or suitable variants thereof.

[0126] Through the use of a guide RNA (gRNA) with a sequence homologous to that of a sequence of DNA in the target genome (known as the protospacer) adjacent to a specific protospacer-adjacent motif (PAM) comprising the sequence NGG (N is any standard base) in the DNA, Cas9 can be used to create a double-strand break (DSB) at the targeted sequence. Non-homologous end joining (NHEJ) at DSBs is capable of creating indels and potentially knocking out genes at genetic loci; likewise, homology-directed repair (HDR), with an introduced template DNA, may insert genes or modify the targeted sequence.

[0127] A variety of Cas9-based tools have been developed in recent years. Methods of using guide nucleotide sequence-programmable DNA-binding protein, such as Cas9, for site-specific cleavage (e.g., to modify a genome) have been described (see e.g., Cong et al., Science 339, 819-823 (2013); Mali et al., Science 339, 823-826 (2013); Hwang et al., Nature Biotechnology 31, 227-229 (2013); Jinek et al., eLife 2, e00471 (2013); Dicarlo et al., Nucleic Acids Research (2013); and Jiang et al., Nature Biotechnology 31, 233-239 (2013).

[0128] In 2016, Komor et al. described the use of CRISPR-Cas9 to convert a cytosine base to a thymine base without the introduction of a template DNA strand and without the need for DSBs (Komor et al., Nature, 2016, 533:420-4). After the cytidine deaminase domain of rat APOBEC1 was fused to the N-terminus of catalytically-dead Cas9 (dCas9) using the linker XTEN (resulting in a fusion protein called base editor 1, or BEI), conversion of cytosine to uracil was observed between position 4 and position 8 within the 20-nt protospacer region of DNA (or, to express it a different way, 13 to 17 nucleotides upstream of the PAM). Of note, any cytosine base within this “window” was amenable to editing, resulting in varied outcomes depending on how many and which cytosines were edited. After DNA replication or repair, each uracil was replaced by a thymine, completing the C to T base editing.

[0129] The next version of base editor (BE2) incorporated a uracil glycosylase inhibitor (UGI) fused to the C-terminus of dCas9 to help inhibit base excision repair of the uracil bases resulting from the cytidine deaminase activity (which otherwise would act to restore the original cytosine bases); this improved the efficiency of C to T base editing.

[0130] The next version of base editor (BE3) used a Cas9 nickase rather than dCas9; the nickase cut the unedited strand opposite the edited C to T bases, stimulating the removal of the opposing guanidine through eukaryotic mismatch repair. BE2 and BE3 base editing was observed in both human and murine cell lines. FIG. 1B is an illustration of BE3. The specificity of base editing has been further improved through the addition of mutations to the Cas9 nickase; in similar fashion, Cas9 has been mutated to narrow the width of the editing window from approximately 5 nucleotides to as little as 1-2 nucleotides (Rees et al., Nat Commun, 2017, 8:15790, Kim et al., Nat Biotechnol, 2017, 35:371-6).

[0131] By fusing Escherichia coli adenine tTNA deaminase TadA (ecTadA) to dCas9 and mutagenesis of the ecTadA domain in conjunction with selection for editing activity revealed that A106V and D108N mutations yielded a base editor capable of editing adenine to guanine in DNA, termed ABE7.10 (Gaudelli et al. Nature, 2017, 551:464-71).

[0132] Adenine 8.8-m (also referred to herein as ABE8.8) uses its core Streptococcus pyogenes nickase Cas9 (nSpCas9) protein with a guide RNA (gRNA) to engage a double-strand protospacer DNA sequence, flanked by an NGG protospacer-adjacent motif (PAM) sequence on its 3′ end. The protospacer sequence is specified via hybridization of the first 20 bases of the gRNA with a complementary sequence on the “target” DNA strand, leaving part of the other (“non-target”) strand in exposed single-strand form structure called the R-loop. Unlike Cas9 and Cas12, ABE8.8 does not make double-strand breaks in targeted DNA sequences. Rather, as illustrated in FIG. 1C, ABE8.8 uses an evolved deoxyadenosine deaminase domain—fused to nSpCas9—to chemically modify an adenosine nucleoside, contained in the single-strand DNA portion of the R-loop, into inosine and nicks the target DNA strand within the DNA: RNA heteroduplex of the R-loop. This nick biases DNA repair machinery to use the freshly deaminated strand as a template, enabling highly efficient transition mutation at the targeted site. The activity window of ABE8.8 typically ranges from positions 3 to 9 in the protospacer DNA sequence specified by the gRNA, 12 to 18 base pairs 5′ of the NGG PAM (positions 21 to 23), with peak editing observed at position 6 of the protospacer (Gaudelli et al., Nat Biotechnol. 2020 July; 38 (7): 892-900).

[0133] In some embodiments, the nucleic acid encoding the base editor fusion protein is a mRNA. In some embodiments, the mRNA generates the base editor fusion protein upon translation in the targeted cell or subject after the administration. In some embodiments, the base editor fusion protein forms a ribonucleoprotein (RNP) complex in the targeted cell or subject.

[0134] It should be appreciated that the fusion proteins of the present disclosure may comprise one or more additional features. For example, in some embodiments, the fusion protein may comprise cytoplasmic localization sequences, export sequences, such as nuclear export sequences, or other localization sequences, as well as sequence tags that are useful for solubilization, purification, or detection of the fusion proteins. Suitable protein tags provided herein include, but are not limited to, biotin carboxylase carrier protein (BCCP) tags, myc-tags, calmodulin-tags, FLAG-tags, hemagglutinin (HA)-tags, polyhistidine tags, also referred to as histidine tags or His-tags, maltose binding protein (MBP)-tags, nus-tags, glutathione-S-transferase (GST)-tags, green fluorescent protein (GFP)-tags, thioredoxin-tags, S-tags, Softags (e.g., Softag 1, Softag 3), strep-tags, biotin ligase tags, FLASH tags, V5 tags, and SBP-tags. Additional suitable sequences will be apparent to those of skill in the art. In some embodiments, the fusion protein comprises one or more His tags.

### Protospacers

[0135] The term “protospacer” or “target sequence” and its grammatical equivalents as used herein can refer to a PAM-adjacent nucleic acid sequence. A protospacer can be a nucleotide sequence within gene, genome, or chromosome that is targeted by a gRNA. In the native state, a protospacer is adjacent to a PAM (protospacer adjacent motif). The site of cleavage by an RNA-guided nuclease is within a protospacer sequence. For example, as illustrated in FIG. 1A, when a gRNA targets a specific protospacer, the Cas protein will generate a double strand break within the protospacer sequence, thereby cleaving the protospacer. Following cleavage, disruption of the protospacer can result though non-homologous end joining or homology-directed repair. Disruption of the protospacer can result in the deletion of the protospacer. Additionally, or alternatively, disruption of the protospacer can result in an exogenous nucleic acid sequence being inserted into or replacing the protospacer.

[0136] With the present disclosure, protospacer sequences were identified within the nucleotide sequence of the human TTR gene to be used as guide sequences that permit ABE8.8 (and other ABE variants containing Streptococcus pyogenes Cas9, such as ABE7.10, or another Cas protein that can use the NGG PAM) to either disrupt the start codon, or disrupt splice sites, whether donors or acceptors, via A→G editing within its editing window (roughly positions 4 to 7 in the 20-nt protospacer region of DNA). Four of the sequences shown in Table 1 were identified within the human TTR gene. The alignment of these four protospacer sequences on a map of the human TTR gene is shown in FIG. 3.

[0137] Protospacer, corresponding to guide RNA GA457, has the sequence 5′-GCCATCCTGCCAAGAATGAG-3′ (SEQ ID NO: 24) and is located at 34,879 to 34,898 bp of the human TTR gene.

[0138] Protospacer, corresponding to guide RNA GA459, has the sequence 5′-GCAACTTACCCAGAGGCAAA-3′ (SEQ ID NO: 25) and is located at 36,007 to 36,026 bp of the human TTR gene.

[0139] Protospacer, corresponding to guide RNA GA460, has the sequence 5′-TATAGGAAAACCAGTGAGTC-3′ (SEQ ID NO: 26) and is located at 38,106-38,125 bp of the human TTR gene.

[0140] Protospacer, corresponding to guide RNA GA461, has the sequence 5′-TACTCACCTCTGCATGCTCA-3′ (SEQ ID NO: 27) and is located at 38,234-38253 of the human TTR gene.

[0141] Protospacer, corresponding to guide RNA GA458, has the sequence 5′-GCCATCCTGCCAAGAACGAG-3′ (SEQ ID NO: 28) represents the sequence within the cynomolgus macaque TTR gene corresponding to the human protospacer sequence corresponding to guide RNA GA459.

[0142] A guide nucleic acid, (e.g., guide RNA) is about 15-100 nucleotides long and comprises a sequence of at least 10 contiguous nucleotides that is complementary to a target protospacer sequence. In some embodiments, the 3′ end of the target sequence is immediately adjacent to a canonical PAM sequence (NGG). In some embodiments, the 3′ end of the target sequence is not immediately adjacent to a canonical PAM sequence (NGG). In some embodiments, the 3′ end of the target sequence is immediately adjacent to an AGC, GAG, TTT, GTG, or CAA sequence.

[0143] In some embodiments, a guide polynucleotide is a DNA. In some embodiments, a guide polynucleotide is an RNA, also referred to herein as a guide RNA or gRNA. In some embodiments, a guide polynucleotide is a modified, artificial polynucleotide.

[0144] In some embodiments, a guide polynucleotide, including but not limited to, a gRNA, may be synthesized. The guide polynucleotide may comprise a spacer sequence configured to hybridize to the complementary sequence of a protospacer sequence as shown in Table 1 under, for example, conditions within a cell. The guide polynucleotide may comprise a spacer sequence that is homologous to a protospacer sequence as shown in Table 1. In some embodiments, the guide polynucleotide comprises a guide RNA comprising a spacer having a sequence homologous to the protospacer set forth in Table 1. In some embodiments, the guide RNA may have a sequence that comprises a guide RNA (gRNA) sequences set forth in Table 1.

[0145] The present disclosure includes a guide polynucleotide having a sequence at least about 75%, at least about 80%, at least about 85%, at least about 90%, or at least about 95% identical to the sequence 5′-GCCAUCCUGCCAAGAAUGAG-3′ (SEQ ID NO: 1) (GA457). The present disclosure includes a guide polynucleotide having the sequence 5′-GCCAUCCUGCCAAGAAUGAG-3′ (SEQ ID NO: 1) (GA457).

[0146] The present disclosure includes a modified guide polynucleotide having a sequence at least about 75%, at least about 80%, at least about 85%, at least about 90%, or at least about 95% identical to the sequence 5′-GCCAUCCUGCCAAGAAUGAG-3′ (SEQ ID NO: 1), wherein GCC are modified by methylation (GA521) (C is modified to 2′-O-methylcytidine, G is modified to 2′-O-methylguanosine). The present disclosure includes a modified guide polynucleotide having the sequence 5′-mGsmCsmCAUCCUGCCAAGAAUGAG-3′ (SEQ IQ NO: 1) (GA521), wherein mC: 2′-O-methylcytidine, mG: 2′-O-methylguanosine and s: phosphorothioate (PS) backbone linkage.

[0147] The present disclosure includes a guide polynucleotide having a sequence at least about 75%, at least about 80%, at least about 85%, at least about 90%, or at least about 95% identical to the sequence 5′-GCCAUCCUGCCAAGAACGAG-3′ (SEQ ID NO: 2) (GA458). The present disclosure includes a guide polynucleotide having the sequence 5′-GCCAUCCUGCCAAGAACGAG-3′ (SEQ ID NO: 2) (GA458).

[0148] The present disclosure includes a guide polynucleotide having a sequence at least about 75%, at least about 80%, at least about 85%, at least about 90%, or at least about 95% identical to the sequence 5′-GCAACUUACCCAGAGGCAAA-3′ (SEQ ID NO: 3) (GA459). The present disclosure includes a guide polynucleotide having the sequence 5′-GCAACUUACCCAGAGGCAAA-3′ (SEQ ID NO: 3) (GA459).

[0149] The present disclosure includes a guide polynucleotide having a sequence at least about 75%, at least about 80%, at least about 85%, at least about 90%, or at least about 95% identical to the sequence 5′-UAUAGGAAAACCAGUGAGUC-3′ (SEQ ID NO: 4) (GA460). The present disclosure includes a guide polynucleotide having the sequence 5′-UAUAGGAAAACCAGUGAGUC-3′ (SEQ ID NO: 4) (GA460).

[0150] The present disclosure includes a guide polynucleotide having a sequence at least about 75%, at least about 80%, at least about 85%, at least about 90%, or at least about 95% identical to the sequence 5′-UACUCACCUCUGCAUGCUCA-3′ (SEQ ID NO: 5) (GA461). The present disclosure includes a guide polynucleotide having the sequence 5′-UACUCACCUCUGCAUGCUCA-3′ (SEQ ID NO: 5) (GA461).

[0151] In some aspects, provided herein is a guide RNA, comprising a sequence defined by mG*mC*mC*AUCCUGCCAAGAAUGAGmGUUUUAGmAmGmCmUmAGmAmAmAmUm AmGmCmAmAGUUmAAmAAmUAmAmGmGmCmUmAGUmCmCGUUAmUmCAAmCm UmUGmAmAmAmAmAmGmUmGGmCmAmCmCmGmAmGmUmCmGmGmUmGmCmU*mU*mU*mU (GA521, (SEQ ID NO: 11), wherein A is adenosine, C is cytidine, G is guanosine, U is uridine, mA* is 2′-O-methyladenosine, mC* is 2′-O-methylcytidine, mG* is 2′-O-methylguanosine, mU* is 2′-O-methyluridine, and wherein nucleotides represented in bold are linked by a phosphorothioate (PS) backbone linkage.

[0152] Alternatively, GA521 is represented as mG*smC*smC*AUCCUGCCAAGAAUGAGmGsUsUsUsUsAsGsmAsmsGsmCsmUsm AsGsmAsmAsmAsmUsmAsmGsmCssmAsmAsGsUsUsmAsAsmAsAsmUsAsmAsmGsmGsm CsmUsmAsGsUsmCsmCsGsUsUsAsmUsmCsAsAsmCsmUsmUsGsmAsmAsmAsmAsmAsmG smUsmGsGsmCsmAsmCsmCsmGsmAsmGsmUsmCsmGsmGsmUsmGsmCsmU*smU*smU*smU (GA521) (SEQ ID NO: 11), wherein A is adenosine, C is cytidine, G is guanosine, U is uridine, mA* is 2′-O-methyladenosine, mC* is 2′-O-methylcytidine, mG* is 2′-O-methylguanosine, mU*is 2′-O-methyluridine, and wherein nucleotides are linked by a phosphorothioate (PS) backbone linkage represented by the letter ‘s’.

[0153] In some embodiments, mG*mC*mC*AUCCUGCCAAGAAUGAGmGUUUUAGmAmGmCmUmAGmAmAmAmUm AmGmCmAmAGUUmAAmAAmUAmAmGmGmCmUmAGUmCmCGUUAmUmCAAmCm UmUGmAmAmAmAmAmGmUmGGmCmAmCmCmGmAmGmUmCmGmGmUmGmCmU*mU*mU*mU (GA521,SEQ ID NO: 11), wherein A is adenosine, C is cytidine, G is guanosine, U is uridine, mA* is 2′-O-methyladenosine, mC* is 2′-O-methylcytidine, mG* is 2′-O-methylguanosine, mU* is 2′-O-methyluridine, and wherein nucleotides represented in bold are linked by a phosphorothioate (PS) backbone linkage.

[0154] Alternatively, GA521 is represented as mG*mC*mC*AUCCUGCCAAGAAUGAGmGsUsUsUsUsAsGsmAsmsGsmCsmUsmAsGsmA smAsmAsmUsmAsmGsmCssmAsmAsGsUsUsmAsAsmAsAsmUsAsmAsmGsmGsmCsmUsm AsGsUsmCsmCsGsUsUsAsmUsmCsAsAsmCsmUsmUsGsmAsmAsmAsmAsmAsmGsmUsmG sGsmCsmAsmCsmCsmGsmAsmGsmUsmCsmGsmGsmUsmGsmCsmU*mU*mU*mU (GA521) (SEQ ID NO: 11), wherein A is adenosine, C is cytidine, G is guanosine, U is uridine, mA* is 2′-O-methyladenosine, mC* is 2′-O-methylcytidine, mG* is 2′-O-methylguanosine, mU* is 2′-O-methyluridine, and wherein nucleotides represented in bold are linked by a phosphorothioate (PS) backbone linkage represented by the letter ‘s’.

[0155] In some embodiments, at least two or more of the tracrRNA nucleotides are linked by a phosphorothioate (PS) backbone linkage. In some embodiments, all the tracrRNA nucleotides are linked by a phosphorothioate (PS) backbone linkage. In some embodiments, only the tracrRNA nucleotides are linked by a phosphorothioate (PS) backbone linkage.

[0156] In some embodiments, only methyl modified nucleotides are linked by a phosphorothioate (PS) backbone linkage.

[0157] A guide polynucleotide may include at least three regions: a first region at the 5′ end that can be homologous to a target site in a chromosomal sequence (spacer region), a second internal region that can form a stem loop structure, and a third 3′ region that can be single-stranded. The second and third regions are considered a tracr sequence or region of the guide RNA and serves as a binding scaffold for the base editor or CRISPR/Cas protein, while the spacer regions serves to guide the protein to a specific target site. The acronym tracr refers to trans-activating crispr.

[0158] The second region of a gRNA may form a secondary structure. In some embodiments, a secondary structure formed by a gRNA can comprise a stem (or hairpin) and a loop. A length of a loop and a stem can vary. In some embodiments, a loop can range from about 3 to about 10 nucleotides in length. In some embodiments, a stem can range from about 6 to about 20 nucleotides in length. A stem can comprise one or more bulges of 1 to 10 nucleotides or about 10 nucleotides. In some embodiments, the overall length of a second region can range from about 16 to 60 nucleotides in length. In some embodiments, a loop can be about 4 nucleotides in length. In some embodiments, a stem can be about 12 in length.

[0159] The third region of gRNA at the 3′ end can be single-stranded. In some embodiments, a third region is not complementary to any chromosomal sequence in a cell of interest and is not complementary to the rest of a gRNA. The third region may have any suitable length. For example, the third region may be three or more or four or more nucleotides in length. In some embodiments, the length of a third region can vary, ranging from about 5 to about 60 nucleotides in length.

[0160] In some embodiments, the guide polynucleotide includes a spacer sequence that is homologous to a protospacer sequence of the TTR gene as shown in Table 1 with 0, 1, 2, 3, 4, or 5 mismatches. In some embodiments, the guide polynucleotide includes a spacer sequence homologous to a protospacer sequence of the TTR gene as shown in Table 1 with no mismatches.

[0161] In some embodiments, the length of a guide polynucleotide depends on the CRISPR/Cas component of the base editor system and components used. For example, different Cas proteins from different bacterial species have varying optimal targeting sequence lengths. Accordingly, the targeting sequence may comprise 5, 6, 7, 8, 9, 10, 11, 12, 13, 14, 15, 16, 17, 18, 19, 20, 21, 22, 23, 24, 25, 26, 27, 28, 29, 30, 31, 32, 33, 34, 35, 36, 37, 38, 39, 40, 41, 42, 43, 44, 45, 46, 47, 48, 49, 50, or more than 50 nucleotides in length. In some embodiments, the targeting sequence comprises 18-24 nucleotides in length. In some embodiments, the targeting sequence comprises 19-21 nucleotides in length. In some embodiments, such as those described in Table 1, the targeting sequence comprises 20 nucleotides in length.

[0162] In some embodiments, a guide polynucleotide includes a spacer sequences and otherwise conforms to the standard 100-nt Streptococcus pyogenes CRISPR gRNA sequence.

[0163] In some embodiments, the guide RNA is chemically modified. Chemically modified gRNAs may have increased stability when transfected into mammalian cells. For example, gRNAs can be chemically modified to comprise a combination of 2′-O-methylribosugar and phosphorothioate backbone modifications on at least one 5′ nucleotide and at least one 3′ nucleotide of each gRNA. In some cases, the three terminal 5′ nucleotides and three terminal 3′ nucleotides are chemically modified to comprise combinations of 2′-O-methylribosugar and phosphorothioate modifications.

[0164] The gRNAs described herein can be synthesized chemically, enzymatically, or a combination thereof. For example, the gRNA can be synthesized using standard phosphoramidite-based solid-phase synthesis methods. Alternatively, the gRNA can be synthesized in vitro by operably linking DNA encoding the gRNA to a promoter control sequence that is recognized by a phage RNA polymerase. Examples of suitable phage promoter sequences include, but are not limited to, T7, T3, SP6 promoter sequences, or variations thereof. In some embodiments, gRNA comprises two separate molecules (e.g., crRNA (which comprises the spacer) and tracrRNA). One molecule (e.g., crRNA) can be chemically synthesized and the other molecule (e.g., tracrRNA) can be enzymatically synthesized.

### Therapeutic Applications

[0165] The guide polynucleotides and compositions described herein may be administered to target cells or a subject in need thereof, in a therapeutically effective amount, to prevent or treat conditions related to transthyretin amyloidosis. In some embodiments, the subject has hereditary transthyretin amyloidosis (hATTR). In some embodiments, the subject has cardiomyopathy due to transthyretin amyloidosis (ATTR-CM). In some embodiments, the subject has polyneuropathy due to transthyretin amyloidosis (ATTR-PN). In some embodiments, the subject has wild-type ATTR (ATTRwt), the age-related deposition of wild type TTR protein (formerly known as senile amyloidosis).

[0166] With such administration, the guide polynucleotide directs the editor system (e.g., ABE editor system) to affect a nucleobase alteration in a TTR gene in the subject, editing the TTR gene to reduce or abolish the amount of full-length, functional protein being produced, thus treating the conditions. In some embodiments, the base alteration occurs in the cells of the liver (hepatocytes) in the subject.

[0167] For example, the gRNA and an adenosine base editor protein, which may be expressed in a cell wherein target gene editing is desired, such as, for example, a liver cell, thereby allowing contact of the target gene with the gRNA and the adenosine base editor protein. In some embodiments, the binding of the adenosine base editor protein to its target polynucleotide sequence in the target gene is directed by the guide RNA, wherein the spacer sequence of the gRNA hybridizes with a target polynucleotide sequence in a target gene e.g., a complimentary sequence to the protospacer. Thus, the guide RNA directs adenosine base editor protein to edit the target polynucleotide sequence (e.g., the protospacer sequence) in the target gene. In some embodiments, the guide RNA is co-introduced into a cell where editing is desired with the adenosine base editor protein or with a nucleic acid encoding the adenosine base editor protein.

[0168] In certain embodiments, adenine base editors may be used to disrupt gene function and/or expression by modifying nucleobases at splice sites of target genes. In some embodiments, an adenosine nucleobase editor as described herein may be used to disrupt a splice donor site at the 5′ end of an introns or a splice acceptor site at the 3′ ends of an intron. In some embodiments, splice site disruption results in the inclusion of intronic sequences in messenger RNA (mRNA)—potentially introducing nonsense, frameshift, or in-frame indel mutations that result in premature stop codons or in insertion/deletion of amino acids that disrupt protein activity—or in the exclusion of exonic sequences, which can also introduce nonsense, frameshift, or in-frame indel mutations.

[0169] Canonical splice donors comprise the DNA sequence GT on the sense strand, whereas canonical splice acceptors comprise the DNA sequence AG. In some embodiments, a base editor, such as an adenosine nucleobase editor as described herein can be used to generate alteration of the sequence disrupts normal splicing. In some embodiments, the adenosine base editor disrupts a complementary A on the antisense strand of the splice donor, causing an edit of GT→GC. In some embodiments, the adenosine base editor disrupts the A of the splice acceptor site on the sense strand, causing an edit of AG→GG.

[0170] In some embodiments, the methods and composition disclosed herein reduce or abolish the expression and/or function of the transthyretin protein encoded by the TTR gene. For example, the methods and composition disclosed herein may reduce expression and/or function of transthyretin by at least 2-fold, at least 3-fold, at least 4-fold, at least 5-fold, at least 6-fold, at least 7-fold, at least 8-fold, at least 9-fold, or at least 10-fold relative to a control.

[0171] In some embodiments, the method for treating or preventing a condition in a subject in need thereof as described herein includes administering (i) a guide polynucleotide and (ii) a nucleic acid encoding a base editor fusion protein to the subject.

[0172] In some embodiments, the method for treating or preventing a condition in a subject in need thereof as described herein includes administering a lipid nanoparticle (LNP) enclosing a (i) guide polynucleotide or a nucleic acid encoding the guide polynucleotide and/or (ii) a base editor fusion protein comprising a programmable DNA binding domain and a deaminase or a nucleic acid encoding the same. In some aspects, the (i) guide polynucleotide or nucleic acid encoding the same and (ii) the base editor fusion protein comprising a programmable DNA binding domain and a deaminase or a nucleic acid encoding the same are enclosed the same LNPs. In some aspects, they are enclosed in separate LNPs.

### Pharmaceutical Compositions

[0173] In some aspects, provided herein is a pharmaceutical composition comprising the base editor system as provided herein and a pharmaceutically acceptable carrier or excipient. In some aspects, provided herein, is a pharmaceutical composition for gene modification comprising a guide RNA as described herein and a base editor fusion protein or a nucleic acid sequence encoding the base editor fusion protein and a pharmaceutically acceptable carrier. Pharmaceutical compositions are formulated in a conventional manner using one or more pharmaceutically acceptable inactive ingredients that facilitate processing of the active compounds into preparations that can be used pharmaceutically. Suitable formulations for use in the present disclosure and methods of delivery are generally well known in the art. Proper formulation is dependent upon the route of administration chosen. A summary of pharmaceutical compositions described herein can be found, for example, in Remington: The Science and Practice of Pharmacy, Nineteenth Ed (Easton, Pa.: Mack Publishing Company, 1995); Hoover, John E., Remington's Pharmaceutical Sciences, Mack Publishing Co., Easton, Pennsylvania 1975; Liberman, H. A. and Lachman, L., Eds., Pharmaceutical Dosage Forms, Marcel Decker, New York, N.Y., 1980; and Pharmaceutical Dosage Forms and Drug Delivery Systems, Seventh Ed. (Lippincott Williams & Wilkins 1999).

[0174] A pharmaceutical composition can be a mixture of a guide RNA as described herein or a nucleic acid sequence encoding the guide RNA and a base editor fusion protein or a nucleic acid sequence encoding the base editor fusion protein with one or more of other chemical components (i.e., pharmaceutically acceptable ingredients), such as carriers, excipients, binders, filling agents, suspending agents, flavoring agents, sweetening agents, disintegrating agents, dispersing agents, surfactants, lubricants, colorants, diluents, solubilizers, moistening agents, plasticizers, stabilizers, penetration enhancers, wetting agents, anti-foaming agents, antioxidants, preservatives, or one or more combination thereof. The pharmaceutical composition facilitates administration to an organism or a subject in need thereof.

[0175] The pharmaceutical compositions of the present disclosure can be administered to a subject using any suitable methods known in the art. The pharmaceutical compositions described herein can be administered to the subject in a variety of ways, including parenterally, intravenously, intradermally, intramuscularly, colonically, rectally, or intraperitoneally. In some embodiments, the pharmaceutical compositions can be administered by intraperitoneal injection, intramuscular injection, subcutaneous injection, or intravenous injection of the subject. In some embodiments, the pharmaceutical compositions can be administered parenterally, intravenously, intramuscularly, or orally.

[0176] In some embodiments, a pharmaceutical composition for gene modification includes a further therapeutic agent. The additional therapeutic agent may modulate different aspects of the disease, disorder, or condition being treated and provide a greater overall benefit than administration of the therapeutic agent alone. Therapeutic agents include, but are not limited to, a chemotherapeutic agent, a radiotherapeutic agent, a hormonal therapeutic agent, and/or an immunotherapeutic agent. In some embodiments, the therapeutic agent may be a radiotherapeutic agent. In some embodiments, the therapeutic agent may be a hormonal therapeutic agent. In some embodiments, the therapeutic agent may be an immunotherapeutic agent. In some embodiments, the therapeutic agent is a chemotherapeutic agent. Preparation and dosing schedules for additional therapeutic agents can be used according to manufacturers' instructions or as determined empirically by a skilled practitioner.

### Lipid Nanoparticle (LNP) Compositions

[0177] The pharmaceutical compositions for gene modification described herein may be encapsulated in lipid nanoparticles (LNP). As used herein, a “lipid nanoparticle (LNP) composition” or a “nanoparticle composition” is a composition comprising one or more described lipids. LNP compositions or formulations, as contemplated herein, are typically sized on the order of micrometers or smaller and may include a lipid bilayer. Nanoparticle compositions encompass lipid nanoparticles (LNPs), liposomes (e.g., lipid vesicles), and lipoplexes. For example, a nanoparticle composition or formulation as contemplated herein may be a liposome having a lipid bilayer with a diameter of 500 nm or less. A LNP as described herein may have a mean diameter of from about 1 nm to about 2500 nm, from about 10 nm to about 1500 nm, from about 20 nm to about 1000 nm, from about 30 nm to about 150 nm, from about 40 nm to about 150 nm, from about 50 nm to about 150 nm, from about 60 nm to about 130 nm, from about 50 nm to 90 nm, from about 55 nm to 85 nm, from about 55 nm to 75 nm, from about 50 nm to about 80 nm, from about 60 nm to about 80 nm, from about 70 nm to about 110 nm, from about 70 nm to about 100 nm, from about 80 nm to about 100 nm, from about 90 nm to about 100 nm, from about 70 to about 90 nm, from about 80 nm to about 90 nm, or from about 70 nm to about 80 nm. The LNPs described herein can have a mean diameter of about 30 nm, 35 nm, 40 nm, 45 nm, 50 nm, 55 nm, 60 nm, 65 nm, 70 nm, 75 nm, 80 nm, 85 nm, 90 nm, 95 nm, 100 nm, 105 nm, 110 nm, 115 nm, 120 nm, 125 nm, 130 nm, 135 nm, 140 nm, 145 nm, 150 nm, or greater. In one embodiment the mean diameter of the LNP is about 70 nm+/−20 nm, 70 nm+/−10 nm, 70 nm+/−5 nm. The LNPs described herein can be substantially non-toxic.

[0178] Lipid nanoparticles (LNPs) employ a non-viral drug delivery mechanism that is capable of passing through blood vessels and reaching hepatocytes [Am. J. Pathol. 2010, 176, 14-21]. Apolipoprotein E (ApoE) proteins are capable of binding to the LNPs post PEG-lipid diffusion from the LNP surface with a near neutral charge in the blood stream, and thereby function as an endogenous ligand against hepatocytes, which express the low-density lipoprotein receptor (LDLr) [Mol. Ther., 2010, 18, 1357-1364.]. Control the efficient hepatic delivery of LNP include: 1) effective PEG-lipid shedding from LNP surface in blood serum and 2) ApoE binding to the LNP. Endogenous ApoE-mediated LDLr-dependent LNP delivery route is unavailable or less effective path to achieve LNP-based hepatic gene delivery in patient populations that LDLr deficient.

[0179] Efficient delivery to cells requires specific targeting and substantial protection from the extracellular environment, particularly serum proteins. One method of achieving specific targeting is to conjugate a targeting moiety to an active agents or pharmaceutical effector such as a nucleic acid agent, thereby directing the active agent or pharmaceutical effector to particular cells or tissues depending on the specificity of the targeting moiety. One way a targeting moiety can improve delivery is by receptor mediated endocytotic activity. This mechanism of uptake involves the movement of nucleic acid agent bound to membrane receptors into the interior of an area that is enveloped by the membrane via invagination of the membrane structure or by fusion of the delivery system with the cell membrane. This process is initiated via activation of a cell surface or membrane receptor following binding of a specific ligand to the receptor. Receptor-mediated endocytotic systems include those that recognize sugars such as galactose, mannose, mannose-6-phosphate, peptides and proteins such as transferrin, asialoglycoprotein, vitamin B12, insulin and epidermal growth factor (EGF). Lipophilic moieties, such as cholesterol or fatty acids, when attached to highly hydrophilic molecules such as nucleic acids can substantially enhance plasma protein binding and consequently circulation half-life. Lipophilic conjugates can also be used in combination with the targeting ligands in order to improve the intracellular trafficking of the targeted delivery approach.

[0180] The Asialoglycoprotein receptor (ASGP-R) is a high-capacity receptor, which is abundant on hepatocytes. The ASGP-R shows a 50-fold higher affinity for N-Acetyl-D-Galactosylamine (GalNAc) than D-Gal. LNPs comprising receptor targeting conjugates, may be used to facilitate targeted delivery of the drug substances described herein. The LNPs may include one or more receptor targeting moiety on the surface or periphery of the particle at specified or engineered surface density ranging from relatively low to relatively high surface density. The receptor targeting conjugate may comprise a targeting moiety (or ligand), a linker, and a lipophilic moiety that is connected to the targeting moiety. In some embodiments, the receptor targeting moiety (or ligand) targets a lectin receptor. In some embodiments, the lectin receptor is asialoglycoprotein receptor (ASGPR). In some embodiments the receptor targeting moiety is GalNAc or a derivative GalNAc that targets ASGPR. In one aspect the receptor targeting conjugate comprises of one GalNAc moiety or derivative thereof. In another aspect, the receptor targeting conjugate comprises of two different GalNAc moieties or derivative thereof. In another aspect, the receptor targeting conjugate comprises of three different GalNAc moieties or derivative thereof. In another aspect, the receptor targeting conjugate is lipophilic. In some embodiments, the receptor targeting conjugate comprises one or more GalNAc moieties and one or more lipid moieties, i.e., GalNAc-Lipid. In some embodiments, the receptor targeting conjugate is a GalNAc-Lipid.

[0181] Described herein are (i) LNP compositions comprising an amino lipid, a phospholipid, a PEG lipid, a cholesterol, or a derivative thereof, a payload, or any combination thereof and (ii) LNP compositions comprising an amino lipid, a phospholipid, a PEG-lipid, a cholesterol, a GalNAc-Lipid or a derivative thereof, a payload, or any combination thereof. Each component is described in more detail below.

[0182] In the preparation of LNP compositions comprising the excipients amino lipid, phospholipid, PEG-Lipid and cholesterol, a desired molar ratio of the four excipients is dissolved in a water miscible organic solvent, ethanol for example. The homogenous lipid solution is then rapidly in-line mixed with an aqueous buffer with acidic pH ranging from 4 to 6.5 containing nucleic acid payload to form the lipid nanoparticle (LNP) encapsulating the nucleic acid payload(s). After rapid in-line mixing the LNPs thus formed undergo further downstream processing including concentration and buffer exchange to achieve the final LNP pharmaceutical composition with near neutral pH for administration into cell line or animal diseases model for evaluation, or to administer to human subjects.

[0183] For the preparation of GalNAc-LNP pharmaceutical composition the GalNAc-Lipid is mixed with the four lipid excipients in the water miscible organic solvent prior to the preparation of the GalNAc-LNP. The preparation of the GalNAc-LNP pharmaceutical composition then follow the same steps as described for the LNP pharmaceutical composition. The mol % of the GalNAc-Lipid in the GalNAc-LNP preparation ranges from 0.001 to 2.0 of the total excipients.

[0184] For both LNP and GalNAc-LNP preparation the payload comprises of a guide RNA targeting the TTR gene and an mRNA encoding a base editor protein. In some embodiments, the guide RNA to mRNA ratio in the acidic aqueous buffer and in the final formulation is 6:1, 5:1, 4:1, 3:1, 2.5:1, 2:1, 1.5:1, 1:1, 1:1.5, 1:2, 1:2.5, 1:3, 1:5 or 1:6 by wight. In some embodiment the said mRNA encodes adenosine base editor protein. In some other embodiments the said mRNA encodes cytosine or cytidine base editor protein.

[0185] In some embodiments, an LNP composition may be prepared as described in U.S. patent application Ser. No. 17/192,709, entitled COMPOSITIONS AND METHODS FOR TARGETED RNA DELIVERY, filed on 4 Mar. 2021, claiming the benefit of U.S. Provisional Patent Application Nos. 62/984,866 (filed on 4 Mar. 2020) and 63/078,982 (filed on 16 Sep. 2020), naming Kallanthottathil G. Rajeev as an inventor and Verve Therapeutics, Inc. as the applicant, which application is hereby incorporated herein by reference in its entirety.

### Amino Lipids

[0186] In some embodiments, the LNP composition comprises an amino lipid. In some embodiments, the cationic lipid is an ionizable lipid. In some embodiments, the amino lipid (e.g., an ionizable lipid) is a cationic lipid. In some embodiments, the amino lipid (e.g., an ionizable and/or cationic lipid) comprises one or more nitrogen atoms. Exemplary, non-limiting amino lipids suitable for the compositions described herein include those described herein.

### Formula (I)

[0187] In one aspect, disclosed herein is an amino lipid having the structure of Formula (I), or a pharmaceutically acceptable salt or solvate thereof,

[chemical structure]

wherein
[0188] each of R¹ and R² is independently C₃-C₂₂ alkyl, C₃-C₂₂ alkenyl, C₃-C₈ cycloalkyl, —C₂-C₁₀ alkylene-L-R⁶, or

[chemical structure]

wherein each of the alkyl, alkylene, alkenyl, and cycloalkyl is independently substituted or unsubstituted;
[0189] each of X, Y, and Z is independently —C(═O)NR⁴—, —NR⁴C(═O)—, —C(═O)O—, —OC(═O)—, —OC(═O)O—, —NR⁴C(═O)O—, —OC(═O)NR⁴—, —NR⁴C(═O)NR⁴—, —NR⁴C(═NR⁴)NR⁴—, —C(═S)NR⁴—, —NR⁴C(═S)—, —C(═O)O—, —OC(═S)—, OC(═S)O—, —NR⁴C(═S)O—, —OC(═S)NR⁴—, —NR⁴C(═S)NR⁴—, —C(═O)S—, —SC(═O)—, —OC(═O)S—, —NR⁴C(═O)S—. —SC(═O)NR⁴—, —C(═S)S—, —SC(═S)—, —SC(═S)O—, —NR⁴C(═S)S—, —SC(═S)NR⁴—, —C(═S)S—, —SC(═S)—, —SC(═O)S—, —SC(═S)S—, —NR⁴C(═S)S—, —SC(═S)NR⁴—O, S, or a bond;
[0190] each of L is independently —C(═O)NR⁴—, —NR⁴C(═O)—, —C(═O)O—. —OC(═O)O—, —NR⁴C(═O)O—, —OC(═O)NR⁴—, —NR⁴C(═O)NR⁴—, —NR⁴C(═NR⁴)NR⁴—, —C(═S)NR⁴—, —NR⁴C(═S)—, —C(═O)O—, —OC(═S)—, OC(═S)O—, —NR⁴C(═S)O—, —OC(═S)NR⁴—, —NR⁴C(═S)NR⁴—, —C(═O)S—, SC(═O)—, —OC(═O)S—, —NR⁴C(═O)S—, —SC(═O)NR⁴—, —C(═S)S—, —SC(═S)—, —SC(═S)O—, —NR⁴C(═S)S—, —SC(═S)NR⁴—, —C(═S)S—, —SC(═S)—, —SC(═O)S—, —SC(═S)S—, —NR⁴C(═S)S—, —SC(═S)NR⁴—, O, S, —C₁-C₁₀ alkylene-O—, —C₁-C₁₀ alkylene-C(═O)O—, —C₁-C₁₀ alkylene-OC(═O)—, or a bond, wherein the alkylene is substituted or unsubstituted;

[0191] R³ is —C₀-C₁₀ alkylene-NR⁷R⁸, —C₀-C₁₀ alkylene-heterocycloalkyl, or —C₀-C₁₀ alkylene-heterocycloaryl, wherein the alkylene, heterocycloalkyl and heterocycloalkyl is independently substituted or unsubstituted; each of R⁴ is independently hydrogen or substituted or unsubstituted C₁-C₆ alkyl;
[0192] R⁵ is hydrogen or substituted or unsubstituted C₁-C₆ alkyl;
[0193] each of R⁶ is independently substituted or unsubstituted C₃-C₂₂ alkyl or substituted or unsubstituted C₃-C₂₂ alkenyl;
[0194] each of R⁷ and R⁸ is independently hydrogen or substituted or unsubstituted C₁-C₆ alkyl, or R⁷ and R⁸ taken together with the nitrogen to which they are attached form a substituted or unsubstituted C₂-C₆ heterocyclyl;
[0195] p is an integer selected from 1 to 10; and
[0196] each of n, m, and q is independently 0, 1, 2, 3, 4, or 5.

[0197] In some embodiments of Formula (I), if the structure carries more than one asymmetric C-atom, each asymmetric C-atom independently represents racemic, chirally pure R and/or chirally pure S isomer, or a combination thereof.

[0198] In some embodiments, each of n, in, and q in Formula (I) is independently 0, 1, 2, or 3. In some embodiments, each of n, m, and q in Formula (I) is 1.

### Formula (Ia)

[0199] In some embodiments, the compound of Formula (I) has a structure of Formula (Ia), or a pharmaceutically acceptable salt or pharmaceutically acceptable solvate thereof:

[chemical structure]

wherein
[0200] each of R¹ and R² is independently C₃-C₂₂ alkyl, C₃-C₂₂ alkenyl, C₃-C₈ cycloalkyl, —C₂-C₁₀ alkylene-L-R⁶, or

[chemical structure]

wherein each of the alkyl, alkylene, alkenyl, and cycloalkyl is independently substituted or unsubstituted;
[0201] each of X, Y, and Z is independently C(═O)NR⁴—, —NR⁴C(D)-, —C(═O)O—, —OC(═O)—, —OC(═O)O—, —NR⁴C(═O)O—, —OC(═O)NR⁴—, —NR⁴C═O)NR⁴—, —NR⁴C(═NR⁴)NR⁴. —C(═S)NR⁴—, —NR⁴C(═S)—, —C(E)O—, —OC(═S)—, OC(═S)O—, —NR⁴C(═S)O—, —OC(═S)NR⁴—, —NR⁴C(═S)NR⁴—, —C(═O)S—, —SC(═O)—, —OC(═O)S—, —NR⁴C(═O)S—, —SC(═O)NR⁴— —C(═S)S—, —SC(═S)—, —SC(═S)O—, —NR⁴C(═S)S—, —SC(═S)NR⁴—, —C(═S)S—. —SC(═S)—, —SC(═O)S—, —SC(═S)S—. —NR⁴C(═S)S—, —SC(═S)NR⁴—, O, S, —C₁-C₁₀ alkylene-O—, or a bond, wherein the alkylene is substituted or unsubstituted;
[0202] each of L is independently —C(═O)NR⁴—, —NR⁴C(═O)—, —C(═O)O—, —OC(═O)—, —OC(═O)O—, —NR⁴C(═O)O—, —OC(═O)NR⁴—, —NR⁴C(═O)NR⁴—, —NR⁴C(═NR⁴)NR⁴—. —C(═S)NR⁴—, —NR⁴C(═S)—, —C(═O)O—, —OC(═S)—, OC(═S)O—, —NR⁴C(═S)O—, —OC(═S)NR⁴—, —NR⁴C(═S)NR⁴—, —C(═O)S—, —SC(═O)—, —OC(═O)S—, —NR⁴C(═O)S—, —SC(═O)NR⁴— —C(═S)S—, —SC(═S)—, —SC(═S)O—, —NR⁴C(═S)S—, —SC(═S)NR⁴—, —C(═S)S—, —SC(═S)—, —SC(═O)S—, —SC(═S)S—, —NR⁴C(═S)S—, —SC(═S)NR⁴—, O, S. —C₁-C₁₀ alkylene-O—, —C₁-C₁₀ alkylene-C(═O)O—, —C₁-C₁₀ alkylene-OC(═O)—, or a bond, wherein the alkylene is substituted or unsubstituted;
[0203] R³ is —C₀-C₁₀ alkylene-NR⁷R⁸, —C₀-C₁₀ alkylene-heterocycloalkyl, or —C₀-C₁₀ alkylene-heterocycloxy, wherein the alkylene, heterocycloalkyl and heterocycloaryl is independently substituted or unsubstituted;
[0204] each of R⁴ is independently hydrogen or substituted or unsubstituted C₁-C₆ alkyl;
[0205] R⁵ is hydrogen or substituted or unsubstituted C₁-C₆ alkyl;
[0206] each of R⁶ is independently substituted or unsubstituted C₃-C₂₂ alkyl or substituted or unsubstituted C₃-C₂₂ alkenyl;
[0207] each of R⁷ and R⁸ is independently hydrogen or substituted or unsubstituted C₁-C₆ alkyl, or R⁷ and R⁸ taken together with the nitrogen to which they are attached form a substituted or unsubstituted C₂-C₆ heterocyclyl; and
[0208] p is an integer selected from 1 to 10.

[0209] In some embodiments of Formula (Ia), if the structure carries more than one asymmetric C-atom, each asymmetric C-atom independently represents racemic, chirally pure R and/or chirally pure S isomer, or a combination thereof.

### Variations of Formula (I) and (Ia)

[0210] In some embodiments, R¹ and R² in Formula (I) and Formula (Ia) is independently C₃-C₂₂ alkyl, C₃-C₂₂ alkenyl, —C₂-C₁₀ alkylene-L-R⁶, or

[chemical structure]

wherein each of the alkyl, alkylene, alkenyl, and cycloalkyl is independently substituted or unsubstituted. In some embodiments, R¹ and R² in Formula (I) and Formula (Ia) is independently C₁₀-C₂₀ alkyl, C₁₀-C₂₀ alkenyl. —C₈-C₇ alkylene-L-R⁶, or

[chemical structure]

wherein each of the alkyl, alkylene, alkenyl, and cycloalkyl is independently substituted or unsubstituted. In some embodiments, R¹ in Formula (I) and Formula (Ia) is

[chemical structure]

[0211] In some embodiments, each of L in Formula (I) and Formula (Ia) is independently O, S, —C₁-C₁₀ alkylene-O—, —C₁-C₁₀ alkylene-C(═O)O—, —C₁-C₁₀ alkylene-OC(═O)—, or a bond, wherein the alkylene is substituted or unsubstituted. In some embodiments, each of L in Formula (I) and Formula (Ia) is independently O, S, —C₁-C₃ alkylene-O—, —C₁-C₃ alkylene-C(═O)O—, —C₁-C₃ alkylene-OC(═O)—, or a bond, wherein the alkylene is substituted or unsubstituted. In some embodiments, each of L in Formula (I) and Formula (Ia) is independently O, S, —C₁-C₃ alkylene-O—, —C₁-C₃ alkylene-C(═O)O—, —C₁-C₃ alkylene-OC(═O)—, or a bond, wherein the alkylene is linear or branched unsubstituted alkylene.

[0212] In some embodiments, each of R⁶ in Formula (I) and Formula (Ia) is independently substituted or unsubstituted linear C₃-C₂₂ alkyl or substituted or unsubstituted linear C₃-C₂₂ alkenyl. In some embodiments, each of R⁶ in Formula (I) and Formula (Ia) is independently substituted or unsubstituted C₃-C₂₀ alkyl or substituted or unsubstituted C₃-C₂₀ alkenyl. In some embodiments, each of R⁶ in Formula (I) and Formula (Ia) is independently substituted or unsubstituted C₃-C₁₀ alkyl or substituted or unsubstituted C₃-C₁₀ alkenyl. In some embodiments, each of R⁶ in Formula (I) and Formula (Ia) is independently substituted or unsubstituted C₃-C₁₀ alkyl. In some embodiments, each of R⁶ in Formula (I) and Formula (Ia) is independently substituted or unsubstituted linear C₃-C₁₀ alkyl. In some embodiments, each of R⁶ in Formula (I) and Formula (Ia) is independently substituted or unsubstituted n-pentyl, n-hexyl, n-heptyl, n-octyl, n-nonyl, n-decyl, n-undecyl, or n-dodecyl. In some embodiments, each of R⁶ in Formula (I) and Formula (Ia) is independently substituted or unsubstituted n-octyl. In some embodiments, each of R⁶ in Formula (I) and Formula (Ia) is n-octyl.

[0213] In some embodiments, each of L in Formula (I) and Formula (Ia) is independently-C(═O)O—, —OC(═O)—, —C₁-C₁₀ alkylene-O—, or O. In some embodiments, each of. L in Formula (I) and Formula (Ia) is O. In some embodiments, each of L in Formula (I) and Formula (Ia) is —C₁-C₃ alkylene-O—. In some embodiments, p in Formula (I) and Formula (Ia) is 1, 2, 3, 4, or 5. In some embodiments, p in Formula (I) and Formula (Ia) is 2.

[0214] In some embodiments, R¹ in Formula (I) and Formula (Ia) is

[chemical structure]

[chemical structure]

[0215] In some embodiments R¹ in Formula (I) and Formula (Ia) is R².

[0216] In some embodiments, each of R⁴ in Formula (I) and Formula (Ia) is independently H or substituted or unsubstituted C₁-C₄ alkyl. In some embodiments, each of. R⁴ in Formula (I) and Formula (Ia) is independently substituted or unsubstituted linear C₁-C₄ alkyl. In some embodiments, each of R⁴ in Formula (1) and Formula (1a) is H. In some embodiments, each of R⁴ in Formula (I) and Formula (Ia) is independently H, —CH₃, —CH₂CH₃, —CH₂CH₂CH₃, or —CH(CH₃)₂.

[0217] In some embodiments, each of R⁴ in Formula (I) and Formula (Ia) is independently H or —CH₃. In some embodiments, each of R⁴ in Formula (I) and Formula (Ia) is —CH₃.

[0218] In some embodiments, X in Formula (I) and Formula (Ia) is —C(═O)O— or —OC(═O))—. In some embodiments, X in Formula (I) and Formula (Ia) is —C(═O)NR⁴— or —NR⁴C(═O)—. In some embodiments, X in Formula (I) and Formula (Ia) is —C(═O)N(CH₃)—, —N(CH₃)C(═O)—, —C(═O)NH—, or —NHC(═O)—. In some embodiments, X in Formula (I) and Formula (Ia) is —C(═O))NH—, —C(═O)N(CH₃)—. —OC(═O))—, —NHC(═O)—, —N(CH₃)C(═O))—, —C(═O)O—, —OC(═O)O—, —NHC(═O)O—, —N(CH₃)C(═O)O—, —OC(═O))NH—, —OC(═O)N(CH₃)—, —NHC(═O)NH—, —N(CH₃)C(═O))NH—, —NHC(═O)N(CH₃)—, —N(CH₃)C(═O)N(CH₃)—, NHC(═NH)NH—, —N(CH₃)C(═NH)NH—, —NHC(═NH)N(CH₃)—, —N(CH₃)C(═NH)N(CH₃)—, NHC(═NMe)NH—, —N(CH₃)C(═NMe)NH—, —NHC(═NMe)N(CH₃)—, or —N(CH₃)C(═NMe)N(CH₃)—.

[0219] In some embodiments. R² in Formula (I) and Formula (Ia) is C₃-C₂₂ alkyl, C₃-C₂₂ alkenyl, —C₂-C₁₀ alkylene-L-R⁶, or

[chemical structure]

wherein each of the alkyl, alkylene, alkenyl, and cycloalkyl is independently substituted or unsubstituted. In some embodiments, R² in Formula (I) and Formula (Ia) is substituted or unsubstituted C₇-C₂₂ alkyl or substituted or unsubstituted C₃-C₂₂ alkenyl. In some embodiments, R² in Formula (I) and Formula (Ia) is substituted or unsubstituted linear C₇-C₂₂ alkyl or substituted or unsubstituted linear C₃-C₂₂ alkenyl. In some embodiments, R² in Formula (I) and Formula (Ia) is substituted or unsubstituted C₁₀-C₂₀ alkyl or substituted or unsubstituted C₁₀-C₂₀ alkenyl. In some embodiments, R² in Formula (I) and Formula (Ia) is unsubstituted C₁₀-C₂₀ alkyl. In some embodiments, R² in Formula (I) and Formula (Ia) is unsubstituted C₁₀-C₂₀ alkenyl. In some embodiments, R² in Formula (I) and Formula (Ia) is —C₂-C₁₀ alkylene-L-R⁶. In some embodiments, R² in Formula (I) and Formula (Ia) is —C₂-C₁₀ alkylene-C(═O)O—R⁶ or —C₂-C₁₀ alkylene-OC(═O)—R⁶.

[0220] In some embodiments, R² in Formula (I) and Formula (Ia) is

[chemical structure]

[0221] In some embodiments R¹ in Formula (I) and Formula (Ia) is R¹.

[0222] In some embodiments, Y in Formula (I) and Formula (Ia) is —C(═O)O— or —OC(═O)—. In some embodiments, Y in Formula (I) and Formula (Ia) is —C(═O)NR⁴— or —NR⁴C(═O)—. In some embodiments, Y in Formula (I) and Formula (Ia) is —C(═O)N(CH₃)—, —N(CH₃)C(═O)—, —C(═O)NH—, or —NHC(═O)—. In some embodiments, Y in Formula (I) and Formula (Ia) is —OC(═O)O—, —NR⁴C(═O)O—, —OC(═O)NR⁴—, or —NR⁴C(═O)NR⁴—. In some embodiments, Y in Formula (I) and Formula (Ia) is —OC(═O)O—, —NHC(═O)O—, —OC(═O)NH—, —NHC(═O)NH—, —N(CH₃)C(═O)O—. —OC(═O)N(CH₃)—, —N(CH₃)C(═O)N(CH₃)— or —N(CH₃)C(═O)NH—. In some embodiments, Y in Formula (I) and Formula (Ia) is —OC(═O)O—, —NHC(═O)O—, —OC(═O)NH—, or —NHC(═O)NH—.

[0223] In some embodiments, R³ in Formula (I) and Formula (Ia) is —C₀-C₁₀ alkylene-NR⁷R⁸ or —C₀-C₁₀ alkylene-heterocycloalkyl, wherein the alkylene and heterocycloalkyl is independently substituted or unsubstituted. In some embodiments, R³ in Formula (I) and Formula (Ia) is —C₀-C₁₀ alkylene-NR⁷R⁸. In some embodiments, R³ in Formula (I) and Formula (Ia) is —C₁-C₆ alkylene-NR⁷R⁸. In some embodiments, R³ in Formula (I) and Formula (Ia) is —C₁-C₄ alkylene-NR⁷R⁸. In some embodiments, R³ in Formula (I) and Formula (Ia) is —C₁-alkylene-NR⁷R⁸. In some embodiments, R³ in Formula (I) and Formula (Ia) is —C₂-alkylene-NR⁷R⁸. In some embodiments, R³ in Formula (I) and Formula (Ia) is —C₃-alkylene-NR⁷R⁸. In some embodiments, R³ in Formula (I) and Formula (Ia) is —C₄-alkylene-NR⁷R⁸. In some embodiments, R³ in Formula (I) and Formula (Ia) is —C₅-alkylene-NR⁷R⁸. In some embodiments, R³ in Formula (I) and Formula (Ia) is —C₀-C₁₀ alkylene-heterocycloalkyl. In some embodiments, R³ in Formula (I) and Formula (Ia) is —C₁-C₆ alkylene-heterocycloalkyl, wherein the heterocycloalkyl comprises 1 to 3 nitrogen and 0-2 oxygen. In some embodiments, R³ in Formula (I) and Formula (Ia) is —C₁-C₆ alkylene-heterocycloaryl.

[0224] In some embodiments, each of R⁷ and R⁸ in Formula (I) and Formula (Ia) is independently hydrogen or substituted or unsubstituted C₁-C₆ alkyl. In some embodiments, each of R⁷ and R⁸ is independently hydrogen or substituted or unsubstituted C₁-C₃ alkyl. In some embodiments, each of R⁷ and R⁸ is independently substituted or unsubstituted C₁-C₃ alkyl. In some embodiments, each of R⁷ and R⁸ is independently —CH₃, —CH₂CH₃, —CH₂CH₂CH₃, or —CH(CH₃)₂. In some embodiments, each of R and R⁸ is CH₃. In some embodiments, each of R⁷ and R⁸ is —CH₂CH₃.

[0225] In some embodiments, R⁷ and R⁸ in Formula (I) and Formula (Ia) taken together with the nitrogen to which they are attached form a substituted or unsubstituted C₂-C₆ heterocyclyl. In some embodiments, R⁷ and R⁸ taken together with the nitrogen to which they are attached form a substituted or unsubstituted C₂-C₆ heterocycloalkyl. In some embodiments, R⁷ and R⁸ taken together with the nitrogen to which they are attached form a substituted or unsubstituted 3-7 membered heterocycloalkyl.

[0226] In some embodiments, R³ in Formula (I) and Formula (Ia) is

[chemical structure]

[0227] In some embodiments. R³ in Formula (I) and Formula (Ia) is

[chemical structure]

[0228] In some embodiments. R³ in Formula (1) and Formula (1a) is

[chemical structure]

[0229] In some embodiments, Z in Formula (I) and Formula (Ia) is —C(═O)O— or —OC(═O)—.

[0230] In some embodiments, Z in Formula (I) and Formula (Ia) is —C(═O)NR⁴— or —NR⁴C(═O)—.

[0231] In some embodiments, Z in Formula (I) and Formula (Ia) is —C(═O)N(CH₃)—, —N(CH₃)C(═O)—, —C(═O)NH—, or —NHC(═O)—.

[0232] In some embodiments, Z in Formula (I) and Formula (Ia) is —OC(═O)O—, —NR⁴C(═O)O—, —OC(O)NR⁴—, or —NR⁴C(═O)NR⁴—.

[0233] In some embodiments, Z in Formula (I) and Formula (Ia) is —OC(═O)O—, —NHC(═O)O—, —OC(═O)NH—, —NHC(═O)NH—, —N(CH₃)C(═O)O—, —OC(═O)N(CH₃)—, —N(CH₃)C(═O)N(CH₃)—, —NHC(═O)N(CH₃)— or —N(CH₃)C(═O)NH—.

[0234] In some embodiments, Y in Formula (I) and Formula (Ia) is —OC(═O)O—, —NHC(═O)O—, —OC(═O)NH—, or —NHC(═O)NH—.

[0235] In some embodiments, R⁵ in Formula (I) and Formula (Ia) is hydrogen or substituted or unsubstituted C₁-C₃ alkyl.

[0236] In some embodiments, R⁵ in Formula (I) and Formula (Ia) is H, —CH₃, —CH—) CH₃, —CH₂CH₂CH₃, or —CH(CH₃)₂.

[0237] In some embodiments, R⁵ in Formula (I) and Formula (Ia) is H.

### Exemplary Lipids of WO2022140252

[0238] In another aspect, an amino lipid is according to any formula or structure, or a pharmaceutically acceptable salt or solvate thereof, as described in International Publication No. WO2022140252, which is hereby incorporated by reference in its entirety. In some embodiments, an amino lipid has a structure according to any of Formulae A′, A, I″, I′, I, II″, II′, II, III′, III, I″-a, I′-a, I-a, I″-a-i, I″-a-ii, I″-a-iii, I″-b, I′-b, I-b, I″-b-i, I″-b-ii, I″-b-iii, I″-c, I′-c, I-c, I″-c-i, I″-c-ii, I″-c-iii, I′-d, I-d, I′-d-i, II-a, II-a-i, III-a, and III-a-i of WO2022140252, or a pharmaceutically acceptable salt or solvate thereof. Exemplary amino lipids also include any of the lipids of Table 1 of WO2022140252, including any of the lipids represented by Examples 7-1 to 7-253 and Examples 8-1 to 8-106, or a pharmaceutically acceptable salt or solvate thereof.

[0239] In some embodiments, an amino lipid is according to Formula A′ of WO2022140252:

[chemical structure]

[0240] or its N-oxide, or a pharmaceutically acceptable salt thereof, wherein
[0241] L¹ is absent, C₁₋₆ alkylenyl, or C₂₋₆ heteroalkylenyl;
[0242] each L² is independently optionally substituted C₂₋₁₅ alkylenyl, or optionally substituted C₃₋₁₅ heteroalkylenyl;
[0243] L is C₁₋₁₀ alkylenyl, or C₂₋₁₀ heteroalkylenyl;
[0244] X² is —OC(O)—, —C(O)O—, or —OC(O)O—;
[0245] X is absent, —OC(O)—, —C(O)O—, or —OC(O)O—;
[0246] R″ is hydrogen,

[chemical structure]

or an optionally substituted group selected from C₆₋₂₀ aliphatic, 3- to 12-membered cycloaliphatic, 7- to 12-membered bridged bicyclic comprising 0-4 heteroatoms independently selected from nitrogen, oxygen, or sulfur, 1-adamantyl, 2-adamantyl, sterolyl, and phenyl;
[0247] each of R and R^{a} is independently hydrogen, or an optionally substituted group selected from C₆₋₂₀ aliphatic, 3- to 12-membered cycloaliphatic, 7- to 12-membered bridged bicyclic comprising 0-4 heteroatoms independently selected from nitrogen, oxygen, or sulfur, 1-adamantyl, 2-adamantyl, sterolyl, and phenyl
[0248] each of L³ and L^{3a} is independently absent, optionally substituted C₁₋₁₀ alkylenyl, or optionally substituted C₂₋₁₀ heteroalkylenyl;
[0249] R¹ is hydrogen, optionally substituted phenyl, optionally substituted 3- to 7-membered cycloaliphatic, optionally substituted 3- to 7-membered heterocyclyl comprising 1-3 heteroatoms independently selected from nitrogen, oxygen, and sulfur, optionally substituted 5- to 6-membered monocyclic heteroaryl comprising 1-4 heteroatoms independently selected from nitrogen, oxygen, and sulfur, optionally substituted 8- to 10-membered bicyclic heteroaryl comprising 1-4 heteroatoms independently selected from nitrogen, oxygen, and sulfur, —OR², —C(O)OR², —C(O)SR², —OC(O)R², —OC(O)OR², —CN, —N(R²)₂, —C(O)N(R²)₂, —S(O)₂N(R²)₂, —NR²C(O)R², —OC(O)N(R²)₂, —N(R²)C(O)OR², —NR²S(O)₂R², —NR²C(O)N(R²)₂, —NR²C(S)N(R²)₂, —NR²C(NR²)N(R²)₂, —NR²C(CHR²)N(R²)₂, —N(OR²)C(O)R², —N(OR²) S(O)₂R², —N(OR²)C(O)OR², —N(OR²)C(O)N(R²)₂, —N(OR²) C(S)N(R²)₂, —N(OR²) C(NR²)N(R²)₂, —N(OR²) C(CHR²)N(R²)₂, —C(NR²)N(R²)₂, —C(NR²)R², —C(O)N(R²)OR², —C(R²) N(R²)₂C(O)OR², —CR²(R³)₂, —OP(O)(OR²)₂, or —P(O)(OR²)₂; or
[0250] R¹ is

[chemical structure]

or a ring selected from 3- to 7-membered cycloaliphatic and 3- to 7-membered heterocyclyl comprising 1-3 heteroatoms independently selected from nitrogen, oxygen, and sulfur, wherein the cycloaliphatic or heterocyclyl ring is optionally substituted with 1-4 R² or R³ groups;
[0251] each R² is independently hydrogen, oxo, —CN, —NO₂, —OR⁴, —S(O)₂R⁴, —S(O)₂N(R⁴)₂, —(CH₂)ₙ—R⁴, or an optionally substituted group selected from C₁₋₆ aliphatic, phenyl, 3- to 7-membered cycloaliphatic, 5- to 6-membered monocyclic heteroaryl comprising 1-4 heteroatoms independently selected from nitrogen, oxygen, and sulfur, and 3- to 7-membered heterocyclyl comprising 1-3 heteroatoms independently selected from nitrogen, oxygen, and sulfur; or
   [0252] two occurrences of R², taken together with the atom(s) to which they are attached, form optionally substituted 4- to 7-membered heterocyclyl comprising 0-1 additional heteroatom selected from nitrogen, oxygen, and sulfur;
[0253] each R³ is independently —(CH₂)ₙ—R⁴; or
   [0254] two occurrences of R³, taken together with the atom(s) to which they are attached, form optionally substituted 5- to 6-membered heterocyclyl comprising 0-1 additional heteroatom selected from nitrogen, oxygen, and sulfur;
[0255] each R⁴ is independently hydrogen, —OR⁵, —N(R⁵)₂, —OC(O)R⁵, —OC(O)OR⁵, —CN, —C(O)N(R⁵)₂, —NR⁵C(O)R⁵, —OC(O)N(R⁵)₂, —N(R⁵)C(O)OR⁵, —NR⁵S(O)₂R⁵, —NR⁵C(O)N(R⁵)₂, —NR⁵C(S)N(R⁵)₂, —NR⁵C(NR⁵)N(R⁵)₂, or

[chemical structure]

[0256] each R⁵ is independently hydrogen, or optionally substituted C₁₋₆ aliphatic; or
   [0257] two occurrences of R⁵, taken together with the atom(s) to which they are attached, form optionally substituted 4- to 7-membered heterocyclyl comprising 0-1 additional heteroatom selected from nitrogen, oxygen, and sulfur;
[0258] each R⁶ is independently C4-12 aliphatic; and
[0259] each n is independently 0 to 4.

[0260] In some embodiments, an amino lipid is according to Formula III-a of WO2022140252:

[chemical structure]

or its N-oxide, or a pharmaceutically acceptable salt thereof, wherein each of R, R¹, L, L¹, L², L³ is as defined therein for any of Formulae A′, A, III′, and III, and described in classes and subclasses above and herein, both singly and in combination. In embodiments of Formula III-a, each of R, R¹, L, L¹, L², L³ is as defined herein for Formula A′ above.

[0261] In some embodiments, an amino lipid is according to Formula III-a-i of WO2022140252:

[chemical structure]

or its N-oxide, or a pharmaceutically acceptable salt thereof, wherein each of R, R¹, L, L¹, and L² is as defined therein for any of Formulae A′, A, III′, and III, and described in classes and subclasses above and herein, both singly and in combination. In embodiments of Formula III-a-i, each of R, R¹, L, L¹, and L² is as defined herein for Formula A′ above.

[0262] In some embodiments, an amino lipid is selected from any of the lipids described in Table 1 of WO2022140252, or its N-oxide, or a pharmaceutically acceptable salt thereof. In embodiments, an amino lipid is selected from the group consisting of:

[chemical structure]

[chemical structure]

[chemical structure]

[chemical structure]

[chemical structure]

[chemical structure]

[chemical structure]

[chemical structure]

[chemical structure]

[chemical structure]

[chemical structure]

[chemical structure]

[0263] In some embodiments, an amino lipid is Example 7-1, or a pharmaceutically acceptable salt thereof. In some embodiments, an amino lipid is Example 7-2, or a pharmaceutically acceptable salt thereof. In some embodiments, an amino lipid is Example 7-19, or a pharmaceutically acceptable salt thereof. In some embodiments, an amino lipid is Example 7-20, or a pharmaceutically acceptable salt thereof. In some embodiments, an amino lipid is Example 7-22, or a pharmaceutically acceptable salt thereof. In some embodiments, an amino lipid is Example 7-24, or a pharmaceutically acceptable salt thereof. In some embodiments, an amino lipid is Example 7-25, or a pharmaceutically acceptable salt thereof. In some embodiments, an amino lipid is Example 8-1, or a pharmaceutically acceptable salt thereof. In some embodiments, an amino lipid is Example 8-2, or a pharmaceutically acceptable salt thereof. In some embodiments, an amino lipid is Example 8-3, or a pharmaceutically acceptable salt thereof. In some embodiments, an amino lipid is Example 8-4, or a pharmaceutically acceptable salt thereof. In some embodiments, an amino lipid is Example 8-5, or a pharmaceutically acceptable salt thereof. In some embodiments, an amino lipid is Example 8-13, or a pharmaceutically acceptable salt thereof. In some embodiments, an amino lipid is Example 8-14, or a pharmaceutically acceptable salt thereof. In some embodiments, an amino lipid is Example 8-17, or a pharmaceutically acceptable salt thereof. In some embodiments, an amino lipid is Example 8-18, or a pharmaceutically acceptable salt thereof. In some embodiments, an amino lipid is Example 8-19, or a pharmaceutically acceptable salt thereof. In some embodiments, an amino lipid is Example 8-20, or a pharmaceutically acceptable salt thereof. In some embodiments, an amino lipid is Example 8-55, or a pharmaceutically acceptable salt thereof. In some embodiments, an amino lipid is Example 8-57, or a pharmaceutically acceptable salt thereof. In some embodiments, an amino lipid is Example 8-58, or a pharmaceutically acceptable salt thereof. In some embodiments, an amino lipid is Example 8-59, or a pharmaceutically acceptable salt thereof. In some embodiments, an amino lipid is Example 8-60, or a pharmaceutically acceptable salt thereof. In some embodiments, an amino lipid is Example 8-61, or a pharmaceutically acceptable salt thereof. In some embodiments, an amino lipid is Example 8-62, or a pharmaceutically acceptable salt thereof. In some embodiments, an amino lipid is Example 8-63, or a pharmaceutically acceptable salt thereof. In some embodiments, an amino lipid is Example 7-232, or a pharmaceutically acceptable salt thereof. In some embodiments, an amino lipid is Example 7-233, or a pharmaceutically acceptable salt thereof. In some embodiments, an amino lipid is Example 7-234, or a pharmaceutically acceptable salt thereof. In some embodiments, an amino lipid is Example 7-235, or a pharmaceutically acceptable salt thereof. In some embodiments, an amino lipid is Example 7-236, or a pharmaceutically acceptable salt thereof. In some embodiments, an amino lipid is Example 7-237, or a pharmaceutically acceptable salt thereof. In some embodiments, an amino lipid is Example 7-238, or a pharmaceutically acceptable salt thereof. In some embodiments, an amino lipid is Example 7-239, or a pharmaceutically acceptable salt thereof. In some embodiments, an amino lipid is Example 8-67, or a pharmaceutically acceptable salt thereof. In some embodiments, an amino lipid is Example 8-68, or a pharmaceutically acceptable salt thereof. In some embodiments, an amino lipid is Example 8-69, or a pharmaceutically acceptable salt thereof. In some embodiments, an amino lipid is Example 8-70, or a pharmaceutically acceptable salt thereof. In some embodiments, an amino lipid is Example 8-71, or a pharmaceutically acceptable salt thereof. In some embodiments, an amino lipid is Example 8-72, or a pharmaceutically acceptable salt thereof. In some embodiments, an amino lipid is Example 7-243, or a pharmaceutically acceptable salt thereof. In some embodiments, an amino lipid is Example 7-244, or a pharmaceutically acceptable salt thereof. In some embodiments, an amino lipid is Example 7-245, or a pharmaceutically acceptable salt thereof. In some embodiments, an amino lipid is Example 7-246, or a pharmaceutically acceptable salt thereof.

### Exemplary Lipids of WO2022159472

[0264] In another aspect, an amino lipid is according to any formula or structure, or a pharmaceutically acceptable salt or solvate thereof, as described in International Publication No. WO2022159472, which is hereby incorporated by reference in its entirety. In some embodiments, an amino lipid has a structure according to any of Formulae I, II, III, IIIA, IIIB, IIIC, IV, V, VA, VI, VIA, VII, and VIIA of WO2022159472, or a pharmaceutically acceptable salt or solvate thereof. Exemplary amino lipids also include any of the lipids of Table 1 of WO2022159472, including any of the lipids represented by Examples 4-1 to 4-86, or a pharmaceutically acceptable salt or solvate thereof.

[0265] In some embodiments, an amino lipid is according to Formula I of WO2022159472:

[chemical structure]

[0266] or a pharmaceutically acceptable salt thereof, wherein:
[0267] L¹ is a covalent bond, —C(O)—, or —OC(O)—;
[0268] L² is a covalent bond, an optionally substituted bivalent saturated or unsaturated, straight or branched C₁-C₁₂ hydrocarbon chain, or

[chemical structure]

[0269] Cy^{A} is an optionally substituted ring selected from phenylene and 3- to 7-membered saturated or partially unsaturated carbocyclene;
[0270] each m is independently 0, 1, or 2;
[0271] L³ is a covalent bond, —C(O)—, —C(O)O—, —OC(O)—, —O—, or —OC(O)O—;
[0272] R¹ is

[chemical structure]

an optionally substituted saturated or unsaturated, straight or branched C₁-C₂₀ hydrocarbon chain wherein 1-3 methylene units are optionally and independently replaced with —O— or —NR—, or

[chemical structure]

[0273] Cy^{B} is an optionally substituted ring selected from 3- to 12-membered saturated or partially unsaturated carbocyclyl, 1-adamantyl, 2-adamantyl,

[chemical structure]

sterolyl, and phenyl;
[0274] p is 0, 1, 2, or 3;
[0275] each L⁴ is independently a bivalent saturated or unsaturated, straight or branched C₁-C₆ hydrocarbon chain;
[0276] each A¹ and A² is independently an optionally substituted C₁-C₂₀ aliphatic or -L⁵-R⁵;
   [0277] or A¹ and A², together with their intervening atoms, may form an optionally substituted ring:

[chemical structure]

[0278] where
   [0279] x is selected from 1 or 2; and
   [0280] #represents the point of attachment to L⁴;
[0281] each L⁵ is independently a bivalent saturated or unsaturated, straight or branched C₁-C₂₀ hydrocarbon chain, wherein 1-3 methylene units are optionally and independently replaced with —O— or —NR—;
[0282] each R⁵ is independently an optionally substituted group selected from a 5- to 10-membered aryl ring or a 3- to 8-membered carbocyclic ring;
[0283] X¹ is a covalent bond, —O—, or —NR—;
[0284] X² is a covalent bond or an optionally substituted, bivalent saturated or unsaturated, straight or branched, C₁-C₁₂ hydrocarbon chain, wherein 1-3 methylene units are optionally and independently replaced with —O—, —NR—, or -Cy^{C}-;
[0285] Cy^{C} is an optionally substituted ring selected from 3- to 7-membered saturated or partially unsaturated carbocyclene, phenylene, 3- to 7-membered saturated or partially unsaturated heterocyclene having 1-3 heteroatoms independently selected from nitrogen, oxygen, and sulfur, and 5- to 6-membered heteroarylene having 1-3 heteroatoms independently selected from nitrogen, oxygen, and sulfur;
[0286] X³ is hydrogen or an optionally substituted ring selected from 3- to 7-membered saturated or partially unsaturated carbocyclyl, phenyl, 3- to 7-membered saturated or partially unsaturated heterocyclyl having 1-3 heteroatoms independently selected from nitrogen, oxygen, and sulfur, or 5- to 6-membered heteroaryl having 1-3 heteroatoms independently selected from nitrogen, oxygen, and sulfur; and
[0287] each R is independently hydrogen or an optionally substituted C₁-C₆ aliphatic group; provided that when L³ is a covalent bond, then R¹ must be

[chemical structure]

[0288] In some embodiments, an amino lipid is according to Formula VI of WO2022159472:

[chemical structure]

or a pharmaceutically acceptable salt thereof, wherein n is 1, 2, 3 or 4, and L², R¹, A¹, A², X¹, X², and X³ are as defined therein for Formula I and also described in classes and subclasses therein, both singly and in combination. In embodiments, L², R¹, A¹, A², X¹, X², and X³ are as defined herein for Formula I above.

[0289] In some embodiments, an amino lipid is according to Formula VIA of WO2022159472:

[chemical structure]

or a pharmaceutically acceptable salt thereof, wherein n is 1, 2, 3 or 4, and L², R¹, A¹, A², X², and X³ are as defined therein for Formula I and also described in classes and subclasses therein, both singly and in combination. In embodiments, L², R¹, A¹, A², X², and X³ are as defined herein for Formula I above.

[0290] In some embodiments, an amino lipid is selected from any of the lipids described in Table 1 of WO2022159472, or a pharmaceutically acceptable salt thereof. In embodiments, an amino lipid is selected from the group consisting of:

[chemical structure]

[chemical structure]

[chemical structure]

[chemical structure]

[chemical structure]

[chemical structure]

[0291] In some embodiments, an amino lipid is Example 4-62, or a pharmaceutically acceptable salt thereof. In some embodiments, an amino lipid is Example 4-63, or a pharmaceutically acceptable salt thereof. In some embodiments, an amino lipid is Example 4-64, or a pharmaceutically acceptable salt thereof. In some embodiments, an amino lipid is Example 4-65, or a pharmaceutically acceptable salt thereof. In some embodiments, an amino lipid is Example 4-66, or a pharmaceutically acceptable salt thereof. In some embodiments, an amino lipid is Example 4-67, or a pharmaceutically acceptable salt thereof. In some embodiments, an amino lipid is Example 4-68, or a pharmaceutically acceptable salt thereof. In some embodiments, an amino lipid is Example 4-69, or a pharmaceutically acceptable salt thereof. In some embodiments, an amino lipid is Example 4-70, or a pharmaceutically acceptable salt thereof. In some embodiments, an amino lipid is Example 4-71, or a pharmaceutically acceptable salt thereof. In some embodiments, an amino lipid is Example 4-72, or a pharmaceutically acceptable salt thereof. In some embodiments, an amino lipid is Example 4-73, or a pharmaceutically acceptable salt thereof. In some embodiments, an amino lipid is Example 4-74, or a pharmaceutically acceptable salt thereof. In some embodiments, an amino lipid is Example 4-75, or a pharmaceutically acceptable salt thereof. In some embodiments, an amino lipid is Example 4-76, or a pharmaceutically acceptable salt thereof. In some embodiments, an amino lipid is Example 4-77, or a pharmaceutically acceptable salt thereof. In some embodiments, an amino lipid is Example 4-78, or a pharmaceutically acceptable salt thereof. In some embodiments, an amino lipid is Example 4-79, or a pharmaceutically acceptable salt thereof. In some embodiments, an amino lipid is Example 4-80, or a pharmaceutically acceptable salt thereof. In some embodiments, an amino lipid is Example 4-81, or a pharmaceutically acceptable salt thereof. In some embodiments, an amino lipid is Example 4-82, or a pharmaceutically acceptable salt thereof. In some embodiments, an amino lipid is Example 4-83, or a pharmaceutically acceptable salt thereof. In some embodiments, an amino lipid is Example 4-84, or a pharmaceutically acceptable salt thereof. In some embodiments, an amino lipid is Example 4-85, or a pharmaceutically acceptable salt thereof. In some embodiments, an amino lipid is Example 4-86, or a pharmaceutically acceptable salt thereof.

### LNP Compositions Comprising Different Amino Lipids

[0292] In some embodiments, the LNP comprises a plurality of amino lipids having different formulas. For example, the LNP composition can comprise 2, 3, 4, 5, 6.7, 8, 9. 10, or more amino lipids. For another example, the LNP composition can comprise at least 2, at least 3, at least 4, at least 5, at least 6, at least 7, at least 9, at least 10, or at least 20 amino lipids. For yet another example, the LNP composition can comprise at most 2, at most 3, at most 4, at most 5, at most 6, at most 7, at most 9, at most 10, at most 20, or at most 30 amino lipids.

[0293] In some embodiments, the LNP composition comprises a first amino lipid. In some embodiments, the LNP composition comprises a first amino lipid and a second amino lipid. In some embodiments, the LNP composition comprises a first amino lipid, a second amino lipid, and a third amino lipid. In some embodiments, the LNP composition comprises a first amino lipid, a second amino lipid, a third amino lipid, and a fourth amino lipid. In some embodiments, the LNP composition does not comprise a fourth amino lipid. In some embodiments, the LNP composition does not comprise a third amino lipid. In some embodiments, a molar ratio of the first amino lipid to the second amino lipid is from about 0.1 to about 10. In some embodiments, a molar ratio of the first amino lipid to the second amino lipid is from about 0.20 to about 5. In some embodiments, a molar ratio of the first amino lipid to the second amino lipid is from about 0.25 to about 4. In some embodiments, a molar ratio of the first amino lipid to the second amino lipid is about 0.25, about 0.33, about 0.5, about 1, about 2, about 3, or about 4.

[0294] In some embodiments, a molar ratio of the first amino lipid:the second amino lipid:the third amino lipid is about 4:1:1. In some embodiments, a molar ratio of the first amino lipid:the second amino lipid:the third amino lipid is about 1:1:1. In some embodiments, a molar ratio of the first amino lipid:the second amino lipid:the third amino lipid is about 2:1:1. In some embodiments, a molar ratio of the first amino lipid:the second amino lipid:the third amino lipid is about 2:2:1. In some embodiments, a molar ratio of the first amino lipid:the second amino lipid:the third amino lipid is about 3:2:1. In some embodiments, a molar ratio of the first amino lipid:the second amino lipid:the third amino lipid is about 3:1:1. In some embodiments, a molar ratio of the first amino lipid:the second amino lipid:the third amino lipid is about 5:1:1. In some embodiments, a molar ratio of the first amino lipid:the second amino lipid:the third amino lipid is about 3:3:1. In some embodiments, a molar ratio of the first amino lipid:the second amino lipid:the third amino lipid is about 4:4:1.

### Additional Amino Lipid Embodiments

[0295] In some embodiments, the LNP composition comprises one or more amino lipids. In some embodiments, the one or more amino lipids comprise from about 40 mol % to about 65 mol % of the total lipid present in the particle. In some embodiments, the one or more amino lipids comprise about 40 mol %, about 41 mol %, about 42 mol %, about 43 mol %, about 44 mol %, about 45 mol %, about 46 mol %, about 47 mol %, about 48 mol %, about 49 mol %, about 50 mol %, about 51 mol %, about 52 mol %, about 53 mol %, about 54 mol %, about 55 mol %, about 56 mol %, about 57 mol %, about 58 mol %, about 59 mol %, about 60 mol %, about 61 mol %, about 62 mol %, about 63 mol %, about 64 mol %, or about 65 mol % of the total lipid present in the particle. In some embodiments, the first amino lipid comprises from about 1 mol % to about 99 mol % of the total amino lipids present in the particle. In some embodiments, the first amino lipid comprises from about 16.7 mol % to about 66.7 mol % of the total amino lipids present in the particle. In some embodiments, the first amino lipid comprises from about 20 mol % to about 60 mol % of the total amino lipids present in the particle.

[0296] In some embodiments, the amino lipid is an ionizable lipid. An ionizable lipid can comprise one or more ionizable nitrogen atoms. In some embodiments, at least one of the one or more ionizable nitrogen atoms is positively charged. In some embodiments, at least 10 mol %, 20 mol %, 30 mol %, 40 mol %, 50 mol %, 60 mol %, 70 mol %, 80 mol %. 90 mol %, 95 mol %, or 99 mol % of the ionizable nitrogen atoms in the LNP composition are positively charged. In some embodiments, the amino lipid comprises a primary amine, a secondary amine, a tertiary amine, an imine, an amide, a guanidine moiety, a histidine residue, a lysine residue, an arginine residue, or any combination thereof. In some embodiments, the amino lipid comprises a primary amine, a secondary amine, a tertiary amine, a guanidine moiety, or any combination thereof. In some embodiments, the amino lipid comprises a tertiary amine.

[0297] In some embodiments, the amino lipid (e.g. an ionizable lipid) is a cationic lipid. In some embodiments, the cationic lipid is an ionizable lipid. In some embodiments, the amino lipid comprises one or more nitrogen atoms. In some embodiments, the amino lipid comprises one or more ionizable nitrogen atoms. Exemplary cationic and/or ionizable lipids include, but are not limited to, 3-(didodecylamino)-N1,N1,4-tri dodecyl-1-piperazineethane amine (KL10), N142-(didodecylamino)ethyl]-N1,N4,N4-tridodecyl-1,4-piperazinediethanamine (KL22), 14,25-ditridecyl-15,18,21,24-tetraaza-octatriacontane (KL25), 1,2-dilinoleyloxy-N,N-dimethylaminopropane (DLin-DMA), 2,2-dilinoleoyl-4-dimethylaminomethyl-[1,3]-dioxolane (DLin-K-DMA), heptatriaconta-6,9,28,31-tetraen-19-yl 4-(dimethylamino) butanoate (DLin-MC 3-DMA), 2,2-dilinoleoyl 1-4-(2-dimethylaminoethyl)-[1,3]-dioxolane (DLin-KC2-DMA), 1,2-dioleyloxy-N,N-dimethylaminopropane (DODMA), 2-({8-[(3β)-cholest-5-en-3-yloxy]octyl}oxy)-N,N-dimethyl-3-[(9Z,12Z)-octadeca-9,12-dien-1-yloxy]propan-1-amine (Octyl-CLinDMA), (2R)-2-({8-[(3β)-cholest-5-en-3-yloxy]octyl}oxy)-N,N-dimethyl-3-[(9Z,12Z)-octadeca-9,12-dien-1-yloxy]propan-1-amine (Octyl-CLinDMA (2R)), and (2S)-2-({8-[(3β)-cholest-5-en-3-yloxy]octyl}oxy)-N,N-dimethyl-3-[(9Z,12Z)-octadeca-9,12-dien-1-yloxy]propan-1-amine (Octyl-CLinDMA (2S)).

[0298] In some embodiments, an amino lipid described herein can take the form of a salt, such as a pharmaceutically acceptable salt. All pharmaceutically acceptable salts of the amino lipid are encompassed by this disclosure. As used herein, the term “amino lipid” also includes its pharmaceutically acceptable salts, and its diastereomeric, enantiomeric, and epimeric forms.

[0299] In some embodiments, an amino lipid described herein, possesses one or more stereocenters and each stereocenter exists independently in either the R or S configuration. The lipids presented herein include all diastereomeric, enantiomeric, and epimeric forms as well as the appropriate mixtures thereof. The lipids provided herein include all cis. trans, syn, anti, entgegen (E), and zusammen (Z) isomers as well as the appropriate mixtures thereof. In certain embodiments, lipids described herein are prepared as their individual stereoisomers by reacting a racemic mixture of the compound with an optically active resolving agent to form a pair of diastereoisomeric compounds/salts, separating the diastereomers and recovering the optically pure enantiomers. In some embodiments, resolution of enantiomers is carried out using covalent diastereomeric derivatives of the compounds described herein. In another embodiment, diastereomers are separated by separation/resolution techniques based upon differences in solubility. In other embodiments, separation of stereoisomers is performed by chromatography or by the forming diastereomeric salts and separation by recrystallization, or chromatography, or any combination thereof. Jean Jacques, Andre Collet, Samuel H. Wilen, “Enantiomers, Racemates and Resolutions”, John Wiley and Sons, Inc., 1981. In one aspect, stereoisomers are obtained by stereoselective synthesis.

[0300] In some embodiments, the lipids such as the amino lipids are substituted based on the structures disclosed herein. In some embodiments, the lipids such as the amino lipids are unsubstituted. In another embodiment, the lipids described herein are labeled isotopically (e.g., with a radioisotope) or by another other means, including, but not limited to, the use of chromophores or fluorescent moieties, bioluminescent labels, or chemiluminescent labels.

[0301] Lipids described herein include isotopically-labeled compounds, which are identical to those recited in the various formulae and structures presented herein, but for the fact that one or more atoms are replaced by an atom having an atomic mass or mass number different from the atomic mass or mass number usually found in nature. Examples of isotopes that can be incorporated into the present lipids include isotopes of hydrogen, carbon, nitrogen, oxygen, sulfur, fluorine, and chlorine, such as, for example, ²H, ³H, ¹³C, ¹⁴C, ¹⁵N, ¹⁸O, ¹⁷O, ³⁵S, ¹⁸F, ³⁶Cl. In one aspect, isotopically-labeled lipids described herein, for example those into which radioactive isotopes such as ³H and ¹⁴C are incorporated, are useful in drug and/or substrate tissue distribution assays. In one aspect, substitution with isotopes such as deuterium affords certain therapeutic advantages resulting from greater metabolic stability, such as, for example, increased in vivo half-life or reduced dosage requirements.

[0302] In some embodiments, the asymmetric carbon atom of the amino lipid is present in enantiomerically enriched form. In certain embodiments, the asymmetric carbon atom of the amino lipid has at least 50% enantiomeric excess, at least 60% enantiomeric excess, at least 70% enantiomeric excess, at least 80% enantiomeric excess, at least 90% enantiomeric excess, at least 95% enantiomeric excess, or at least 99% enantiomeric excess in the(S)- or (R)-configuration.

[0303] In some embodiments, the disclosed amino lipids can be converted to N-oxides. In some embodiments, N-oxides are formed by a treatment with an oxidizing agent (e.g., 3-chloroperoxybenzoic acid and/or hydrogen peroxides). Accordingly, disclosed herein are N-oxide compounds of the described amino lipids, when allowed by valency and structure, which can be designated as NO or N⁺—O⁻. In some embodiments, the nitrogen in the compounds of the disclosure can be converted to N-hydroxy or N-alkoxy. For example, N-hydroxy compounds can be prepared by oxidation of the parent amine by an oxidizing agent such as ra-CPBA. All shown nitrogen-containing compounds are also considered. Accordingly, also disclosed herein are N-hydroxy and N-alkoxy (e.g., N—OR, wherein R is substituted or unsubstituted C₁-C₆ alkyl, C₁-C₆ alkenyl, C₁-C₆ alkynyl, 3-14-membered carbocycle or 3-14-membered heterocycle) derivatives of the described amino lipids.

[0304] In some embodiments, the one or more amino lipids comprise from about 40 mol % to about 65 mol % of the total lipid present in the particle.

### PEG-Lipids

[0305] In some embodiments, the described LNP composition includes one or more PEG-lipids. As used herein, a “PEG lipid” or “PEG-lipid” refers to a lipid comprising a polyethylene glycol component. Examples of suitable PEG-lipids also include, but are not limited to, PEG-modified phosphatidylethanolamines, PEG-modified phosphatidic acids, PEG-modified ceramides, PEG-modified dialkylamines, PEG-modified diacylglycerols, PEG-modified dialkylglycerols, and mixtures thereof. For example, the one or more PEG-lipids can comprise PEG-c-DOMG, PEG-DMG, PEG-DLPE, PEG-DMPE, PEG-DPPC, a PEG-DSPE lipid, or a combination thereof.

[0306] In some embodiments, PEG-lipid comprises from about 0.1 mol % to about 10 mol % of the total lipid present in the particle.

### Phospholipid

[0307] In some embodiments, the described LNP composition includes one or more phospholipids.

[0308] In some embodiments, the phospholipid comprises from about 5 mol % to about 15 mol % of the total lipid present in the particle.

### Cholesterol

[0309] In some embodiments, the LNP composition includes a cholesterol or a derivative thereof.

### GalNAc-Lipid

[0310] In some embodiments, the LNP composition includes a receptor targeting conjugate comprising a compound formula (V),

[chemical structure]

[0311] wherein,
[0312] a plurality of the A groups collectively comprise a receptor targeting ligand;
[0313] each L¹, L², L³, L⁴, L⁵, L⁶, L⁷, L⁸, L⁹, L¹⁰ and L¹² is independently substituted or unsubstituted C₁-C₁₂ alkylene, substituted or unsubstituted C₁-C₁₂ heteroalkylene, substituted or unsubstituted C₂-C₁₂ alkenylene, substituted or unsubstituted C₂-C₁₂ alkynylene, —(CH₂CH₂O)ₘ—, —(OCH₂CH₂)ₘ—, —O—, —S—, —S(═O)—, —S(═O)₂—, —S(═O)(═NR¹)—, —C(═O)—, —C(═N—OR¹)—, —C(═O)O—, —OC(═O)—, —C(═O)C(═O)—, —C(═O)NR¹—, —NR¹C(═O)—, —OC(═O)NR¹—, —NR¹C(═O)O—, —NR¹C(═O)NR¹—, —C(═O)NR¹C(═O)—, —S(═O)₂NR¹—, —NR¹S(═O)₂—, —NR¹—, or —N(OR¹)—;
[0314] L¹¹ is substituted or unsubstituted —(CH₂CH₂O)ₙ—, substituted or unsubstituted —(OCH₂CH₂)ₙ— or substituted or unsubstituted —(CH₂)ₙ—;
[0315] each R¹ is independently H or substituted or unsubstituted C₁-C₆alkyl;
[0316] R is a lipid, nucleic acid, amino acid, protein, or lipid nanoparticle;
[0317] m is an integer selected from 1 to 10; and
[0318] n is an integer selected from 1 to 200.

[0319] In some embodiments, each L¹, L⁴, and L⁷ is independently substituted or unsubstituted C₁-C₁₂ alkylene. In some embodiments, each L¹, L⁴, and L⁷ is independently substituted or unsubstituted C₂-C₆ alkylene. In some embodiments, each L¹, L⁴, and L⁷ is C₄ alkylene. In some embodiments, each L², L⁵, and L⁸ is independently —C(═O)NR¹—, —NR¹C(═O)—, —OC(═O)NR¹—, —NR¹C(═O)O—, —NR¹C(═O)NR¹—, or —C(═O)NR¹C(═O)—. In some embodiments, each L², L⁵, and L⁸ is independently —C(—O) NR¹— or —NR¹C(═O)—. In some embodiments, each L², L⁵, and L⁸ is —C(═O)NH—. In some embodiments, each L³, L⁶, and L⁹ is independently substituted or unsubstituted C₁-C₁₂ alkylene. In some embodiments, each L³ is substituted or unsubstituted C₂-C₆ alkylene. In some embodiments, L³ is C₄ alkylene. In some embodiments, each L⁶ and L⁹ is independently substituted or unsubstituted C₂-C₁₀ alkylene. In some embodiments, each L⁶ and L⁹ is independently substituted or unsubstituted C₂-C₆ alkylene. In some embodiments, each L⁶ and L⁹ is C₃ alkylene. In some embodiments, A binds to a lectin. In some embodiments, the lectin is an asialoglycoprotein receptor (ASGPR). In some embodiments, A is N-acetylgalactosamine (GalNAc) or

[chemical structure]

or a derivative thereof. A is N-acetylgalactosamine (GalNAc)

[chemical structure]

or a derivative thereof.

[0320] In some embodiments, the receptor targeting conjugate comprises from about 0.001 mol % to about 20 mol % of the total lipid content present in the nanoparticle composition.

### Phosphate Charge Neutralizer

[0321] In some embodiments, the LNP described herein includes a phosphate charge neutralizer. In some embodiments, the phosphate charge neutralizer comprises arginine, asparagine, glutamine, lysine, histidine, cationic dendrimers, polyamines, or a combination thereof. In some embodiments, the phosphate charge neutralizer comprises one or more nitrogen atoms. In some embodiments, the phosphate charge neutralizer comprises a polyamine.

[0322] Suitable phosphate charge neutralizers to be used in LNP formulations, set forth below, for example include, but are not limited to, Spermidine and 1,3-propanediamine.

### Antioxidants

[0323] In some embodiments, the LNP described herein includes one or more antioxidants. In some embodiments, the one or more antioxidants function to reduce a degradation of the cationic lipids, the payload, or both. In some embodiments, the one or more antioxidants comprise a hydrophilic antioxidant. In some embodiments, the one or more antioxidants is a chelating agent such as ethylenediaminetetraacetic acid (EDTA) and citrate. In some embodiments, the one or more antioxidants comprise a lipophilic antioxidant. In some embodiments, the lipophilic antioxidant comprises a vitamin E isomer or a polyphenol. In some embodiments, the one or more antioxidants are present in the LNP composition at a concentration of at least 1 mM, at least 10 mM, at least 20 mM, at least 50 mM, or at least 100 mM. In some embodiments, the one or more antioxidants are present in the particle at a concentration of about 20 mM.

### Other Lipids

[0324] In some embodiments, the disclosed LNP compositions may comprise a helper lipid. In some embodiments, the disclosed LNP compositions comprise a neutral lipid. In some embodiments, the disclosed LNP compositions comprise a stealth lipid. In some embodiments, the disclosed LNP compositions comprises additional lipids. Neutral lipids can function to stabilize and improve processing of the LNPs.

[0325] “Helper lipids” can refer to lipids that enhance transfection (e.g., transfection of the nanoparticle (LNP) comprising the composition as provided herein, including the biologically active agent). The mechanism by which the helper lipid enhances transfection includes enhancing particle stability. In some embodiments, the helper lipid enhances membrane fusogenicity. Helper lipids can include steroids, sterols, and alkyl resorcinols. Helper lipids suitable for use in the present disclosure can include, but are not limited to, cholesterol, 5-heptadecylresorcinol, and cholesterol hemisuccinate. In some embodiments, the helper lipid is cholesterol. In some embodiments, the helper lipid may be cholesterol hemisuccinate.

[0326] “Stealth lipids” can refer to lipids that alter the length of time the nanoparticles can exist in vivo (e.g., in the blood). Stealth lipids can assist in the formulation process by, for example, reducing particle aggregation and controlling particle size. Stealth lipids used herein may modulate pharmacokinetic properties of the LNP. Stealth lipids suitable for use in a lipid composition of the disclosure can include, but are not limited to, stealth lipids having a hydrophilic head group linked to a lipid moiety. Stealth lipids suitable for use in a lipid composition of the present disclosure and information about the biochemistry of such lipids can be found in Romberg et al, Pharmaceutical Research, Vol. 25, No. 1, 2008, pg. 55-71 and I-Toekstra et al, Biochimica et Biophysica Acta 1660 (2004) 41-52. Additional suitable PEG lipids are disclosed, e.g., in WO 2006/007712.

[0327] In some embodiments, the stealth lipid is a PEG-lipid. In one embodiment, the hydrophilic head group of stealth lipid comprises a polymer moiety selected from polymers based on PEG (sometimes referred to as poly(ethylene oxide)), poly(oxazoline), poly(vinyl alcohol), poly(glycerol), poly(N-vinylpyrrolidone), polyaminoacids and poly N-(2-hydroxypropyl)methacrylamide]. Stealth lipids can comprise a lipid moiety. In some embodiments, the lipid moiety of the stealth lipid may be derived from diacylglycerol or diacylglycamide, including those comprising a dialkylglycerol or dialkylglycamide group having alkyl chain length independently comprising from about C4 to about C40 saturated or unsaturated carbon atoms, wherein the chain may comprise one or more functional groups such as, for example, an amide or ester. The dialkylglycerol or dialkylglycamide group can further comprise one or more substituted alkyl groups.

[0328] The structures and properties of helper lipids, neutral lipids, stealth lipids, and/or other lipids are further described in WO2017173054A1, WO2019067999A1, US20180290965A1, US20180147298A1, US20160375134A1, U.S. Pat. Nos. 8,236,770, 8,021,686, 8,236,770B2, U.S. Pat. No. 7,371,404B2, U.S. Pat. No. 7,780,983B2, U.S. Pat. No. 7,858,117B2, US20180200186A1, US20070087045A1, WO2018119514A1, and WO2019067992A1, all of which are hereby incorporated by reference in their entirety.

### LNP Formulations

[0329] Particular formulation of a nanoparticle composition comprising one or more described lipids is described herein.

[0330] The described nanoparticle compositions are capable of delivering a therapeutic agent such as an RNA to a particular cell, tissue, organ, or system or group thereof in a mammal's body. Physiochemical properties of nanoparticle compositions may be altered in order to increase selectivity for particular bodily targets. For instance, particle sizes may be adjusted based on the fenestration sizes of different organs. The therapeutic agent included in a nanoparticle composition may also be selected based on the desired delivery target or targets. For example, a therapeutic agent may be selected for a particular indication, condition, disease, or disorder and/or for delivery to a particular cell, tissue, organ, or system or group thereof (e.g., localized, or specific delivery). In certain embodiments, a nanoparticle composition may include an mRNA encoding a polypeptide of interest capable of being translated within a cell to produce the polypeptide (e.g., base editor) of interest. Such a composition are capable of having specificity or affinity to a particular organ or cell type to facilitate drug substance delivery thereto, for example the liver or hepatocytes.

[0331] The amount of a therapeutic agent or drug substance (e.g., the mRNA that encodes for the base editor and the guide RNA) in an LNP composition may depend on the size, composition, desired target and/or application, or other properties of the nanoparticle composition. For example, the amount of an RNA comprised in a nanoparticle composition may depend on the size, sequence, and other characteristics of the RNA. The relative amounts of a therapeutic agent and other elements (e.g., lipids) in a nanoparticle composition may also vary. In some embodiments, the wt/wt ratio of the lipid component to a therapeutic agent in a nanoparticle composition may be from about 5:1 to about 60:1, such as about 5:1. 6:1, 7:1, 8:1, 9:1, 10:1, 11:1, 12:1, 13:1, 14:1, 15:1, 16:1, 17:1, 18:1, 19:1, 20:1, 25:1, 30:1, 35:1, 40:1, 45:1, 50:1, and 60:1. For example, the wt/wt ratio of the lipid component to a therapeutic agent may be from about 10:1 to about 40:1. In certain embodiments, the wt/wt ratio is about 20:1. The amount of a therapeutic agent in a nanoparticle composition can be measured using absorption spectroscopy (e.g., ultraviolet-visible spectroscopy).

[0332] In some embodiments, an LNP formulation comprises one or more nucleic acids such as RNAs. In some embodiments, the one or more RNAs, lipids, and amounts thereof may be selected to provide a specific N/P ratio. The N/P ratio can be selected from about 1 to about 30. The N/P ratio can be selected from about 2 to about 12. In some embodiments, the N/P ratio is from about 0.1 to about 50. In some embodiments, the N/P ratio is from about 2 to about 8. In some embodiments, the N/P ratio is from about 2 to about 15, from about 2 to about 10, from about 2 to about 8, from about 2 to about 6, from about 3 to about 15, from about 3 to about 10, from about 3 to about 8, from about 3 to about 6, from about 4 to about 15, from about 4 to about 10, from about 4 to about 8, or from about 4 to about 6. In some embodiments, the N/P ratio is about 2, about 2.5, about 3, about 3.5, about 4, about 4.5, about 5, about 5.5, about 6, about 6.5, about 7, about 7.5, about 8, about 9, or about 10. In some embodiments, the N/P ratio is from about 4 to about 6. In some embodiments, the NIP ratio is about 4, about 4.5, about 5, about 5.5, or about 6.

[0333] As used herein, the “N/P ratio” is the molar ratio of ionizable (e.g., in the physiological pH range) nitrogen atoms in a lipid (or lipids) to phosphate groups in a nucleic acid molecular entity (or nucleic acid molecular entities), e.g., in a nanoparticle composition comprising a lipid component and an RNA. Ionizable nitrogen atoms can include, for example, nitrogen atoms that can be protonated at about pH 1, about pH 2, about pH 3, about pH 4, about pH 4.5, about pH 5, about pH 5.5, about pH 6, about pH 6.5, about pH 7, about pH 7.5, or about pH 8 or higher. The physiological pH range can include, for example, the pH range of different cellular compartments (such as organs, tissues, and cells) and bodily fluids (such as blood, CSF, gastric juice, milk, bile, saliva, tears, and urine). In certain specific embodiments, the physiological pH range refers to the pH range of blood in a mammal, for example, from about 7.35 to about 7.45. Similarly, for phosphate charge neutralizers that have one or more ionizable nitrogen atoms, the N/P ratio can refer to a molar ratio of ionizable nitrogen atoms in the phosphate charge neutralizer to the phosphate groups in a nucleic acid. In some embodiments, ionizable nitrogen atoms refer to those nitrogen atoms that are ionizable within a pH range between 5 and 14.

[0334] For the payload that does not contain a phosphate group, the N/P ratio can refer to a molar ratio of ionizable nitrogen atoms in a lipid to the total negative charge in the payload. For example, the N/P ratio of an LNP composition can refer to a molar ratio of the total ionizable nitrogen atoms in the LNP composition to the total negative charge in the payload that is present in the composition.

[0335] In some embodiments, the LNPs are formed with an average encapsulation efficiency ranging from about 50% to about 70%, from about 70% to about 90%, or from about 90% to about 100%. In some embodiments, the LNPs are formed with an average encapsulation efficiency ranging from about 75% to about 98%.

[0336] In another aspect, provided herein is a lipid nanoparticle (LNP) comprising the composition as provided herein. As used herein, a “lipid nanoparticle (LNP) composition” or a “nanoparticle composition” is a composition comprising one or more described lipids. LNP compositions are typically sized on the order of micrometers or smaller and may include a lipid bilayer. Nanoparticle compositions encompass lipid nanoparticles (LNPs), liposomes (e.g., lipid vesicles), and lipoplexes. In some embodiments, a LNP refers to any particle that has a diameter of less than 1000 nm, 500 nm, 250 nm, 200 nm, 150 nm, 100 nm, 75 nm, 50 nm, or 25 nm. In some embodiments, a nanoparticle may range in size from 1-1000 nm, 1-500 nm, 1-250 nm, 25-200 nm, 40-100 nm, 50-100 nm. 50-90 nm, 50-80 nm, 50-70 nm, 55-95 nm, 55-80 nm, 55-75 nm, 60-100 nm, 60-90 nm, 60-80 nm, 60-70 nm, 25-100 nm, 25-80 nm, or 40-80 nm.

[0337] In some embodiments, an LNP may be made from cationic, anionic, or neutral lipids. In some embodiments, an LNP may comprise neutral lipids, such as the fusogenic phospholipid 1,2-dioleoyl-sn-glycero-3-phosphoethanolamine (DOPE) or the membrane component cholesterol, as helper lipids to enhance transfection activity and nanoparticle stability. In some embodiments, an LNP may comprise hydrophobic lipids, hydrophilic lipids, or both hydrophobic and hydrophilic lipids. Any lipid or combination of lipids that are known in the art can be used to produce an LNP. Examples of lipids used to produce LNPs include, but are not limited to DOTMA (N [1-(2,3-dioleyloxy)propyl]-N,N,N-trimethylammonium chloride), DOSPA (N,N-dimethyl-N-([2-sperminecarboxamido]ethyl)-2,3-bis(dioleyloxy)-1-propaniminium pentahydrochloride), DOTAP (1,2-Dioleoyl-3-trimethylammonium propane), DMRIE (N-(2-hydroxyethyl)-N,N-dimethyl-2,3-bis(tetradecyloxy-1-propanaminiumbromide), DC-cholesterol (3β-[N—(N′,N′-dimethylaminoethane)-carbamoyl]cholesterol), DOTAP-cholesterol, GAP-DMORIE-DPyPE, and GL67A-DOPE-DMPE (1,2-Bis(dimethylphosphino) ethane)-polyethylene glycol (PEG). Examples of cationic lipids include, but are not limited to, 98N12-5, C12-200, DLin-KC2-DMA (KC2), DLin-MC3-DMA (MC3), XTC, MD1, and 7C1. Examples of neutral lipids include, but are not limited to, DPSC, DPPC (Dipalmitoylphosphatidylcholine), POPC (1-palmitoyl-2-oleoyl-sn-glycero-3-phosphocholine), DOPE, and SM (sphingomyelin). Examples of PEG-modified lipids include, but are not limited to, PEG-DMG (Dimyristoyl glycerol), PEG-CerC14, and PEG-CerC20. In some embodiments, the lipids may be combined in any number of molar ratios to produce an LNP. In some embodiments, the polynucleotide may be combined with lipid(s) in a wide range of molar ratios to produce an LNP.

[0338] The definitions of terms in the following eight paragraphs apply only the compounds of Formula (I), (Ia), and (V) above.

[0339] The term “substituted”, unless otherwise indicated, refers to the replacement of one or more hydrogen radicals in a given structure with the radical of a specified substituent including, but not limited to: halo, alkyl, alkenyl, alkynyl, aryl, heterocyclyl, thiol, alkylthio, oxo, thioxy, arylthio, alkylthioalkyl, arylthioallcyl, alkylsulfonyl, alkylsulfonylalkyl, arylsulfonylalkyl, alkoxy, aryloxy, aralkoxy, aminocarbonyl, alkylaminocarbonyl, arylaminocarbonyl, alkoxycarbonyl, aryloxycarbonyl, haloalkyl, amino, trifluoromethyl, cyano, nitro, alkylamino, arylamino, alkylaminoalkyl, arylaminoalkyl, aminoalkylamino, hydroxy, alkoxyalkyl, carboxyalkyl, alkoxycarbonylalkyl, aminocarbonylalkyl, acyl, aralkoxycarbonyl, carboxylic acid, sulfonic acid, sulfonyl, phosphonic acid, aryl, heteroaryl, heterocyclic, and an aliphatic group. It is understood that the substituent may be further substituted. Exemplary substituents include amino, alkylamino, and the like.

[0340] As used herein, the term “substituent” means positional variables on the atoms of a core molecule that are substituted at a designated atom position, replacing one or more hydrogens on the designated atom, provided that the designated atom's normal valency is not exceeded, and that the substitution results in a stable compound. Combinations of substituents and/or variables are permissible only if such combinations result in stable compounds. A person of ordinary skill in the art should note that any carbon as well as heteroatom with valences that appear to be unsatisfied as described or shown herein is assumed to have a sufficient number of hydrogen atom(s) to satisfy the valences described or shown. In certain instances, one or more substituents having a double bond (e.g., “oxo” or “—O”) as the point of attachment may be described, shown, or listed herein within a substituent group, wherein the structure may only show a single bond as the point of attachment to the core structure of Formula (I). A person of ordinary skill in the art would understand that, while only a single bond is shown, a double bond is intended for those substituents.

[0341] The term “alkyl” refers to a straight or branched hydrocarbon chain radical, having from one to twenty carbon atoms, and which is attached to the rest of the molecule by a single bond. An alkyl comprising up to 10 carbon atoms is referred to as a C₁-C₁₀ alkyl, likewise, for example, an alkyl comprising up to 6 carbon atoms is a C₁-C₆ alkyl. Alkyls (and other moieties defined herein) comprising other numbers of carbon atoms are represented similarly. Alkyl groups include, but are not limited to, C₁-C₁₀ alkyl, C₁-C₉ alkyl, C₁-C₈alkyl, C₁-C₇ alkyl, C₁-C₆ alkyl, C₁-C₅ alkyl, C₁-C₄ alkyl, C₁-C₃ alkyl, C₁-C₂ alkyl, C₂-C₈ alkyl, C₃-C₈ alkyl and C₄-C₈ alkyl. Representative alkyl groups include, but are not limited to, methyl, ethyl, n-propyl, 1-methylethyl (i-propyl), n-butyl, i-butyl, s-butyl, n-pentyl, 1,1-dimethylethyl (t-butyl), 3-methylhexyl, 2-methylhexyl, 1-ethyl-propyl, and the like. In some embodiments, the alkyl is methyl or ethyl. In some embodiments, the alkyl is —CH(CH₃)₂ or —C(CH₃)₃. Unless stated otherwise specifically in the specification, an alkyl group may be optionally substituted as described below. “Alkylene” or “alkylene chain” refers to a straight or branched divalent hydrocarbon chain linking the rest of the molecule to a radical group. In some embodiments, the alkylene is —CI-12-, —CH₂CH₂—, or —CH₂CH₂CH₂—. In some embodiments, the alkylene is —CH₂—. In some embodiments, the alkylene is —CH₂CH₂—. In some embodiments, the alkylene is —CH₂CH₂CH₂—.

[0342] The term “alkenyl” refers to a type of alkyl group in which at least one carbon-carbon double bond is present. In one embodiment, an alkenyl group has the formula —C(R)═CR², wherein R refers to the remaining portions of the alkenyl group, which may be the same or different. In some embodiments, R is H or an alkyl. In some embodiments, an alkenyl is selected from ethenyl (i.e., vinyl), propenyl (i.e., allyl), butenyl, pentenyl, pentadienyl, and the like. Non-limiting examples of an alkenyl group include —CH═CH₂, —C(CH₃)═CH₂, —CH═CHCH₃, —C(CH₃)═CHCH₃, and —CH₂CH═CH₂.

[0343] The term “cycloalkyl” refers to a monocyclic or polycyclic non-aromatic radical, wherein each of the atoms forming the ring (i.e., skeletal atoms) is a carbon atom. In some embodiments, cycloalkyls are saturated or partially unsaturated. In some embodiments, cycloalkyls are spirocyclic or bridged compounds. In some embodiments, cycloalkyls are fused with an aromatic ring (in which case the cycloalkyl is bonded through a non-aromatic ring carbon atom). Cycloalkyl groups include groups having from 3 to 10 ring atoms. Representative cycloalkyls include, but are not limited to, cycloalkyls having from three to ten carbon atoms, from three to eight carbon atoms, from three to six carbon atoms, or from three to five carbon atoms. Monocyclic cycloalkyl radicals include, for example, cyclopropyl, cyclobutyl, cyclopentyl, cyclohexyl, cycloheptyl, and cyclooctyl. In some embodiments, the monocyclic cycloalkyl is cyclopropyl, cyclobutyl, cyclopentyl or cyclohexyl. In some embodiments, the monocyclic cycloalkyl is cyclopentenyl or cyclohexenyl. In some embodiments, the monocyclic cycloalkyl is cyclopentenyl. Polycyclic radicals include, for example, adamantyl, 1,2-dihydronaphthalenyl, 1,4-dihydronaphthalenyl, tetrainyl, decalinyl, 3,4-dihydronaphthalenyl-1(2H)-one. spiro[2.2]pentyl, norbornyl and bicycle[1.1.1]pentyl. Unless otherwise stated specifically in the specification, a cycloalkyl group may be optionally substituted. Depending on the structure, a cycloalkyl group can be monovalent or divalent (i.e., a cycloalkylene group).

[0344] The term “heterocycle” or “heterocyclic” refers to heteroaromatic rings (also known as heteroaryls) and heterocycloalkyls (also known as heteroalicyclic groups) that includes at least one heteroatom selected from nitrogen, oxygen, and sulfur, wherein each heterocyclic group has from 3 to 12 atoms in its ring system, and with the proviso that any ring does not contain two adjacent O or S atoms. A “heterocyclyl” is a univalent group formed by removing a hydrogen atom from any ring atoms of a heterocyclic compound. In some embodiments, heterocycles are monocyclic, bicyclic, polycyclic, spirocyclic or bridged compounds. Non-aromatic heterocyclic groups (also known as heterocycloalkyls) include rings having 3 to 12 atoms in its ring system and aromatic heterocyclic groups include rings having 5 to 12 atoms in its ring system. The heterocyclic groups include benzofused ring systems. Examples of non-aromatic heterocyclic groups are pyrrolidinyl, tetrahydrofuranyl, dihydrofuranyl, tetrahydrothienyl, oxazolidinonyl, tetrahydropyranyl, dihydropyranyl, tetrahydrothiopyranyl, piperidinyl, morpholinyl. thiomorpholinyl, thioxanyl, piperazinyl, aziridinyl, azetidinyl, oxetanyl, thietanyl, homopiperidinyl, oxepanyl, thiepanyl, oxazepinyl, diazepinyl, thiazepinyl, 1,2,3,6-tetrahydropyridinyl, pyrrolin-2-yl, pyrrolin-3-yl, indolinyl, 2H-pyranyl, 4Hpyranyl, dioxanyl, 1,3-dioxolanyl, pyrazolinyl, dithianyl, dithiolanyl, dihydropyranyl, dihydrothienyl, dihydrofuranyl, pyrazolidinyl, imidazolinyl, imidazolidinyl, 3-azabicyclo[3.1.0]hexanyl 1,3-azabicyclo[4.1.0]heptanyl, 3 h-indolyl, indolin-2-onyl, isoindolin-1-onyl, isoindoline-1,3-dionyl, 3,4-dihydroisoquinolin-1 (2H)-onyl, 3,4-dihydroquinolin-2 (1H)-onyl, isoindoline-1,3-dithionyl, benzo[d]oxazol-2 (3H)-onyl, 1H-benzo[d]imidazol-2 (3H)-onyl, benzo[d]thiazol-2 (3H)-onyl, and quinolizinyl. Examples of aromatic heterocyclic groups are pyridinyl, imidazolyl, pyrimidinyl, pyrazolyl, triazolyl, pyrazinyl, tetrazolyl, futyl, thienyl, isoxazolyl, thiazolyl, oxazolyl, isothiazolyl, pyrrolyl, quinolinyl, isoquinolinyl, indolyl, benzimidazolyl, benzofuranyl, cinnolinyl, indazolyl, indolizinyl, phthalazinyl, pyridazinyl, triazinyl, isoindolyl, pteridinyl, purinyl, oxadiazolyl, thiadiazolyl, furazanyl, benzofurazanyl, benzothiophenyl, benzothiazolyl, benzoxazolyl, quinazolinyl, quinoxalinyl, naphthyridinyl, and furopyridinyl. The foregoing groups are either C-attached (or Clinked) or N-attached where such is possible. For instance, a group derived from pyrrole includes both pyrrol-1-yl (N-attached) or pyrrol-3-yl (C-attached). Further, a group derived from imidazole includes imidazol-1-yl or imidazol-3-yl (both N-attached) or imidazol-2-yl, imidazol-4-yl or imidazol-5-yl (all C-attached). The heterocyclic groups include benzo-fused ring systems. Non-aromatic heterocycles are optionally substituted with one or two oxo (═O) moieties, such as pyrrolidin-2-one. In some embodiments, at least one of the two rings of a bicyclic heterocycle is aromatic. In some embodiments, both rings of a bicyclic heterocycle are aromatic.

[0345] The term “heterocycloalkyl” refers to a cycloalkyl group that includes at least one heteroatom selected from nitrogen, oxygen, and sulfur. Unless stated otherwise specifically in the specification, the heterocycloalkyl radical may be a monocyclic, or bicyclic ring system, which may include fused (when fused with an aryl or a heteroaryl ring, the heterocycloalkyl is bonded through a non-aromatic ring atom) or bridged ring systems. The nitrogen, carbon, or sulfur atoms in the heterocyclyl radical may be optionally oxidized. The nitrogen atom may be optionally quaternized. The heterocycloalkyl radical is partially or fully saturated. Examples of heterocycloalkyl radicals include, but are not limited to, dioxolanyl, thienyl[1,3]dithianyl, tetrahydroquinolyl, tetrahydroisoquinolyl, decahydroquinolyl, decahydroisoquinolyl, imidazolinyl, imidazolidinyl, isothiazolidinyl, isoxazolidinyl, morpholinyl, octahydroindolyl, octahydroisoindolyl, 2-oxopiperazinyl, 2-oxopiperidinyl, 2-oxopyrrolidinyl, oxazolidinyl, piperidinyl, piperazinyl, 4-piperidonyl, pyrrolidinyl, pyrazolidinyl, quinuclidinyl, thiazolidinyl, tetrahydrofuryl, trithianyl, tetrahydropyranyl, thiomorpholinyl, thiamorpholinyl, 1-oxothiomorpholinyl, 1,1-dioxo-thiomorpholinyl. The term heterocycloalkyl also includes all ring forms of carbohydrates, including but not limited to monosaccharides, disaccharides, and oligosaccharides. Unless otherwise noted, heterocycloalkyls have from 2 to 12 carbons in the ring. In some embodiments, heterocycloalkyls have from 2 to 10 carbons in the ring. In some embodiments, heterocycloalkyls have from 2 to 10 carbons in the ring and 1 or 2 N atoms. In some embodiments, heterocycloalkyls have from 2 to 10 carbons in the ring and 3 or 4 N atoms. In some embodiments, heterocycloalkyls have from 2 to 12 carbons, 0-2 N atoms, 0-2 O atoms, 0-2 P atoms, and 0-1 S atoms in the ring. In some embodiments, heterocycloalkyls have from 2 to 12 carbons, 1-3 N atoms, 0-1 O atoms, and 0-1 S atoms in the ring. It is understood that when referring to the number of carbon atoms in a heterocycloalkyl, the number of carbon atoms in the heterocycloalkyl is not the same as the total number of atoms (including the heteroatoms) that make up the heterocycloalkyl (i.e., skeletal atoms of the heterocycloalkyl ring). Unless stated otherwise specifically in the specification, a heterocycloalkyl group may be optionally substituted. As used herein, the term “teterocycloalkylene” can refer to a divalent heterocycloalkyl group.

[0346] The term “heteroaryl” refers to an aryl group that includes one or more ring heteroatoms selected from nitrogen, oxygen, and sulfur. The heteroaryl is monocyclic or bicyclic. Illustrative examples of monocyclic heteroaryls include pyridinyl, imidazolyl, pyrimidinyl, pyrazolyl, triazolyl, pyrazinyl, tetrazolyl, furyl, thienyl, isoxazolyl, thiazolyl, oxazolyl, isothiazolyl, pyrrolyl, pyridazinyl, triazinyl, oxadiazolyl, thiadiazolyl, furazanyl, indolizine, indole, benzofuran, benzothiophene, indazole, benzimidazole, purine, quinolizine, quinoline, isoquinoline, cinnoline, phthalazine, quinazoline, quinoxaline, 1,8-naphthyridine, and pteridine. Illustrative examples of monocyclic heteroaryls include pyridinyl, imidazolyl, pyrimidinyl, pyrazolyl, triazolyl, pyrazinyl, tetrazolyl, furyl, thienyl, isoxazolyl, thiazolyl, oxazolyl, isothiazolyl, pyrrolyl, pyridazinyl, triazinyl, oxadiazolyl, thiadiazolyl, and furazanyl. Illustrative examples of bicyclic heteroaryls include indolizine, indole, benzofuran, benzothiophene, indazole, benzimidazole, purine, quinolizine, quinoline, isoquinoline, cinnoline, phthalazine, quinazoline, quinoxaline, 1,8-naphthyridine, and pteridine. In some embodiments, heteroaryl is pyridinyl, pyrazinyl, pyrimidinyl, thiazolyl, thienyl, thiadiazolyl or furyl. In some embodiments, a heteroaryl contains 0-6 N atoms in the ring. In some embodiments, a heteroaryl contains 1-4 N atoms in the ring. In some embodiments, a heteroaryl contains 4-6 N atoms in the ring. In some embodiments, a heteroaryl contains 0-4 N atoms, 0-1 O atoms, 0-1 P atoms, and 0-1 S atoms in the ring. In some embodiments, a heteroaryl contains 1-4 N atoms, 0-1 O atoms, and 0-1 S atoms in the ring. In some embodiments, heteroaryl is a C₁-C₉ heteroaryl. In some embodiments, monocyclic heteroaryl is a C₁-C₅ heteroaryl. In some embodiments, monocyclic heteroaryl is a 5-membered or 6-membered heteroaryl. In some embodiments, a bicyclic heteroaryl is a C₆-C₉ heteroaryl. In some embodiments, a heteroaryl group is partially reduced to form a heterocycloalkyl group defined herein. In some embodiments, a heteroaryl group is fully reduced to form a heterocycloalkyl group defined herein.

[0347] The definitions of terms in the following twenty-five paragraphs apply only the compounds of Formula A′, III-a, and III-a-I, 1, VI, and VIA above

[0348] The term “aliphatic” or “aliphatic group”, as used herein, means a straight-chain (i.e., unbranched) or branched, substituted or unsubstituted hydrocarbon chain that is completely saturated or that contains one or more units of unsaturation, or a monocyclic hydrocarbon or bicyclic hydrocarbon that is completely saturated or that contains one or more units of unsaturation, but which is not aromatic (also referred to herein as “carbocycle,” “carbocyclic”, “cycloaliphatic” or “cycloalkyl”), that has a single point of attachment to the rest of the molecule. Unless otherwise specified, aliphatic groups contain 1-6 aliphatic carbon atoms. In some embodiments, aliphatic groups contain 1-5 carbon atoms. In some embodiments, aliphatic groups contain 1-4 carbon atoms. In some embodiments, aliphatic groups contain 1-3 carbon atoms, and in some embodiments, aliphatic groups contain 1-2 carbon atoms. In some embodiments, “carbocyclic” (or “cycloaliphatic” or “carbocycle” or “cycloalkyl”) refers to an optionally substituted monocyclic C₃-C₈ hydrocarbon, or an optionally substituted C₆-C₁₂ bicyclic hydrocarbon, that is completely saturated or that contains one or more units of unsaturation, but which is not aromatic, that has a single point of attachment to the rest of the molecule. Suitable aliphatic groups include, but are not limited to, linear or branched, substituted or unsubstituted alkyl, alkenyl, alkynyl groups and hybrids thereof such as (cycloalkyl)alkyl, (cycloalkenyl)alkyl or (cycloalkyl)alkenyl.

[0349] As used herein, the term “alkenyl” refers to an alkyl group, as defined herein, having one or more double bonds. In some embodiments, the term “alkenyl”, used alone or as part of a larger moiety, refers to an optionally substituted straight or branched hydrocarbon chain having at least one double bond and having (unless otherwise specified) 2-20, 2-18, 2-16, 2-14, 2-12, 2-10, 2-8, 2-6, 2-4, or 2-3 carbon atoms (e.g., C₂₋₂₀, C₂₋₁₈, C₂₋₁₆, C₂₋₁₄, C₂₋₁₂, C₂₋₁₀, C₂₋₈, C₂₋₆, C₂₋₄, or C₂₋₃). Exemplary alkenyl groups include ethenyl, propenyl, butenyl, pentenyl, hexenyl, and heptenyl.

[0350] The term “alkenylene” refers to a bivalent alkenyl group. A substituted alkenylene chain is a polymethylene group containing at least one double bond in which one or more hydrogen atoms are replaced with a substituent. Suitable substituents include those described below for a substituted aliphatic group.

[0351] As used herein, the term “alkyl” is given its ordinary meaning in the art and may include saturated aliphatic groups, including straight-chain alkyl groups, branched-chain alkyl groups, cycloalkyl (alicyclic) groups, alkyl substituted cycloalkyl groups, and cycloalkyl substituted alkyl groups. In some embodiments, alkyl has 1-100 carbon atoms. In certain embodiments, a straight chain or branched chain alkyl has about 1-20 carbon atoms in its backbone (e.g., C₁-C₂₀ for straight chain, C₂-C₂₀ for branched chain), and alternatively, about 1-10. In some embodiments, a cycloalkyl ring has from about 3-10 carbon atoms in their ring structure where such rings are monocyclic or bicyclic, and alternatively about 5, 6 or 7 carbons in the ring structure. In some embodiments, an alkyl group may be a lower alkyl group, wherein a lower alkyl group comprises 1-4 carbon atoms (e.g., C₁-C₄ for straight chain lower alkyls).

[0352] The term “alkylenyl” or “alkylene” refers to a bivalent alkyl group (i.e., a bivalent saturated hydrocarbon chain) that is a straight-chain (i.e., unbranched) or branched, substituted or unsubstituted. Any of the above mentioned monovalent alkyl groups may be an alkylenyl by abstraction of a second hydrogen atom from the alkyl. In some embodiments, an “alkylenyl” is a polymethylene group, i.e., —(CH₂)ₙ—, wherein n is a positive integer, preferably from 1 to 10, from 1 to 9, from 1 to 8, from 1 to 7, from 1 to 6, from 1 to 5, from 1 to 4, from 1 to 3, from 1 to 2, from 2 to 5, or from 4 to 8. A substituted alkylenyl is a polymethylene group in which one or more methylene hydrogen atoms are replaced with a substituent. Suitable substituents include those described below for a substituted aliphatic group.

[0353] As used herein, the term “alkynyl” refers to an alkyl group, as defined herein, having one or more triple bonds. In some embodiments, the term “alkynyl”, used alone or as part of a larger moiety, refers to an optionally substituted straight or branched chain hydrocarbon group having at least one triple bond and having (unless otherwise specified) 2-20, 2-18, 2-16, 2-14, 2-12, 2-10, 2-8, 2-6, 2-4, or 2-3 carbon atoms (e.g., C₂₋₂₀, C₂₋₁₈, C₂₋₁₆, C₂₋₁₄, C₂₋₁₂, C₂₋₁₀, C₂₋₈, C₂₋₆, C₂₋₄, or C₂₋₃). Exemplary alkynyl groups include ethynyl, propynyl, butynyl, pentynyl, hexynyl, and heptynyl.

[0354] The term “aryl” refers to monocyclic and bicyclic ring systems having a total of six to fourteen ring members (e.g., C₆₋₁₄), wherein at least one ring in the system is aromatic and wherein each ring in the system contains three to seven ring members. The term “aryl” may be used interchangeably with the term “aryl ring”. In some embodiments, “aryl” refers to an aromatic ring system which includes, but is not limited to, phenyl, naphthyl, anthracyl and the like, which may bear one or more substituents. Unless otherwise specified, “aryl” groups are hydrocarbons.

[0355] As used herein, the term “bivalent” refers to a chemical moiety with two points of attachment. For example, a “bivalent C₁₋₈ (or C₁₋₆) saturated or unsaturated, straight or branched, hydrocarbon chain”, refers to bivalent alkylene, alkenylene, and alkynylene chains that are straight or branched as defined herein.

[0356] As used herein, the term “bridged bicyclic” refers to any bicyclic ring system, i.e. carbocyclic or heterocyclic, saturated or partially unsaturated, having at least one bridge. As defined by IUPAC, a “bridge” is an unbranched chain of atoms or an atom or a valence bond connecting two bridgeheads, where a “bridgehead” is any skeletal atom of the ring system which is bonded to three or more skeletal atoms (excluding hydrogen). In some embodiments, a bridged bicyclic group has 7-12 ring members and 0-4 heteroatoms independently selected from nitrogen, oxygen, or sulfur. Such bridged bicyclic groups are well known in the art and include those groups set forth below where each group is attached to the rest of the molecule at any substitutable carbon or nitrogen atom. Unless otherwise specified, a bridged bicyclic group is optionally substituted with one or more substituents as set forth for aliphatic groups. Additionally or alternatively, any substitutable nitrogen of a bridged bicyclic group is optionally substituted. Exemplary bridged bicyclics include but are not limited to:

[chemical structure]

[0357] The terms “carbocyclyl,” “carbocycle,” and “carbocyclic ring” as used herein, refer to saturated or partially unsaturated cyclic aliphatic monocyclic, bicyclic, or polycyclic ring systems, as described herein, having from 3 to 14 members, wherein the aliphatic ring system is optionally substituted as described herein. Carbocyclic groups include, without limitation, cyclopropyl, cyclobutyl, cyclopentyl, cyclopentenyl, cyclohexyl, cyclohexenyl, cycloheptyl, cycloheptenyl, cyclooctyl, cyclooctenyl, norbornyl, adamantyl, and cyclooctadienyl. In some embodiments, “carbocyclyl” (or “cycloaliphatic”) refers to an optionally substituted monocyclic C₃-C₈ hydrocarbon, or an optionally substituted C₆-C₁₂ bicyclic hydrocarbon that is completely saturated or that contains one or more units of unsaturation, but which is not aromatic, that has a single point of attachment to the rest of the molecule. The term “cycloalkyl” refers to an optionally substituted saturated ring system of about 3 to about 10 ring carbon atoms. In some embodiments, cycloalkyl groups have 3-6 carbons. Exemplary monocyclic cycloalkyl rings include cyclopropyl, cyclobutyl, cyclopentyl, cyclohexyl, and cycloheptyl. The term “cycloalkenyl” refers to an optionally substituted non-aromatic monocyclic or multicyclic ring system containing at least one carbon-carbon double bond and having about 3 to about 10 carbon atoms. Exemplary monocyclic cycloalkenyl rings include cyclopentenyl, cyclohexenyl, and cycloheptenyl.

[0358] The term “haloaliphatic” refers to an aliphatic group substituted by one or more halogen atoms (e.g., one, two, three, four, five, six, or seven halo, such as fluoro, iodo, bromo, or chloro). In some embodiments, haloaliphatic groups contain 1-7 halogen atoms. In some embodiments, haloaliphatic groups contain 1-5 halogen atoms. In some embodiments, haloaliphatic groups contain 1-3 halogen atoms.

[0359] The term “haloalkyl” refers to an alkyl group substituted by one or more halogen atoms (e.g., one, two, three, four, five, six, or seven halo, such as fluoro, iodo, bromo, or chloro). In some embodiments, haloalkyl groups contain 1-7 halogen atoms. In some embodiments, haloalkyl groups contain 1-5 halogen atoms. In some embodiments, haloalkyl groups contain 1-3 halogen atoms.

[0360] The term “heteroalkylenyl” or “heteroalkylene”, as used herein, denotes an optionally substituted straight-chain (i.e., unbranched), or branched bivalent alkyl group (i.e., bivalent saturated hydrocarbon chain) having, in addition to carbon atoms, from one to five heteroatoms. The term “heteroatom” is described below. In some embodiments, heteroalkylenyl groups contain 2-10 carbon atoms wherein 1-3 carbon atoms are optionally and independently replaced with heteroatoms selected from oxygen, nitrogen, and sulfur. In some embodiments, heteroalkylenyl groups contain 2-8 carbon atoms wherein 1-3 carbon atoms are optionally and independently replaced with heteroatoms selected from oxygen, nitrogen, and sulfur. In some embodiments, heteroalkylenyl groups contain 4-8 carbon atoms, wherein 1-3 carbon atoms are optionally and independently replaced with heteroatoms selected from oxygen, nitrogen, and sulfur. In some embodiments, heteroalkylenyl groups contain 2-5 carbon atoms, wherein 1-2 carbon atoms are optionally and independently replaced with heteroatoms selected from oxygen, nitrogen, and sulfur. In yet other embodiments, heteroalkylenyl groups contain 1-3 carbon atoms, wherein 1 carbon atom is optionally and independently replaced with a heteroatom selected from oxygen, nitrogen, and sulfur. Suitable heteroalkylenyl groups include, but are not limited to —CH₂O—, —(CH₂)₂O—, —CH₂OCH₂—, —O(CH₂)₂—, —(CH₂)₃O—, —(CH₂)₂OCH₂—, —CH₂O(CH₂)₂—, —O(CH₂)₃—, —(CH₂)₄O—, —(CH₂)₃OCH₂—, —CH₂O(CH₂)₃—, —(CH₂)₂O(CH₂)₂—, —O(CH₂)₄—. Unless otherwise specified, Cₓ heteroalkylenyl refers to heteroalkylenyl having x number of carbon atoms prior to replacement with heteroatoms.

[0361] The terms “heteroaryl” and “heteroar-”, used alone or as part of a larger moiety, e.g., “heteroaralkyl”, or “heteroaralkoxy”, refer to monocyclic or bicyclic ring groups having 5 to 10 ring atoms (e.g., 5- to 6-membered monocyclic heteroaryl or 9- to 10-membered bicyclic heteroaryl); having 6, 10, or 14 π electrons shared in a cyclic array; and having, in addition to carbon atoms, from one to five heteroatoms. Exemplary heteroaryl groups include, without limitation, thienyl, furanyl, pyrrolyl, imidazolyl, pyrazolyl, triazolyl, tetrazolyl, oxazolyl, isoxazolyl, oxadiazolyl, thiazolyl, isothiazolyl, thiadiazolyl, pyridyl, pyridonyl, pyridazinyl, pyrimidinyl, pyrazinyl, indolizinyl, purinyl, naphthyridinyl, pteridinyl, imidazo[1,2-a]pyrimidinyl, imidazo[1,2-a]pyridinyl, thienopyrimidinyl, triazolopyridinyl, and benzoisoxazolyl. The terms “heteroaryl” and “heteroar-”, as used herein, also include groups in which a heteroaromatic ring is fused to one or more aryl, cycloaliphatic, or heterocyclyl rings, where the radical or point of attachment is on the heteroaromatic ring (i.e., a bicyclic heteroaryl ring having 1 to 3 heteroatoms). Nonlimiting examples include indolyl, isoindolyl, benzothienyl, benzofuranyl, dibenzofuranyl, indazolyl, benzimidazolyl, benzothiazolyl, benzothiadiazolyl, benzoxazolyl, quinolyl, isoquinolyl, cinnolinyl, phthalazinyl, quinazolinyl, quinoxalinyl, 4H quinolizinyl, carbazolyl, acridinyl, phenazinyl, phenothiazinyl, phenoxazinyl, tetrahydroquinolinyl, tetrahydroisoquinolinyl, pyrido[2,3-b]-1,4-oxazin-3 (4H)-one, and benzoisoxazolyl. The term “heteroaryl” may be used interchangeably with the terms “heteroaryl ring”, “heteroaryl group”, or “heteroaromatic”, any of which terms include rings that are optionally substituted.

[0362] The term “heteroatom” means one or more of oxygen, sulfur, nitrogen, phosphorus, or silicon (including, any oxidized form of nitrogen, sulfur, phosphorus, or silicon; the quaternized form of any basic nitrogen or; a substitutable nitrogen of a heterocyclic ring, for example N (as in 3,4-dihydro-2H-pyrrolyl), NH (as in pyrrolidinyl) or NR⁺ (as in N-substituted pyrrolidinyl)).

[0363] The terms “heterocycle”, “heterocyclyl”, “heterocyclic radical”, and “heterocyclic ring” are used interchangeably herein, and refer to a stable 3- to 8-membered monocyclic, a 7- to 12-membered bicyclic, or a 10- to 16-membered polycyclic heterocyclic moiety that is either saturated or partially unsaturated, and having, in addition to carbon atoms, one or more, such as one to four, heteroatoms, as defined above. When used in reference to a ring atom of a heterocycle, the term “nitrogen” includes a substituted nitrogen. As an example, in a saturated or partially unsaturated ring having 0-3 heteroatoms selected from oxygen, sulfur or nitrogen, the nitrogen may be N (as in 3,4-dihydro-2H-pyrrolyl), NH (as in pyrrolidinyl), or NR⁺ (as in N-substituted pyrrolidinyl). A heterocyclic ring can be attached to its pendant group at any heteroatom or carbon atom that results in a stable structure and any of the ring atoms can be optionally substituted. Examples of such saturated or partially unsaturated heterocyclic radicals include, without limitation, azetidinyl, oxetanyl, tetrahydrofuranyl, tetrahydrothienyl, pyrrolidinyl, piperidinyl, decahydroquinolinyl, oxazolidinyl, piperazinyl, tetrahydropyranyl, dioxanyl, dioxolanyl, diazepinyl, oxazepinyl, thiazepinyl, morpholinyl, thiamorpholinyl, and

[chemical structure]

A heterocyclyl group may be mono-, bi-, tri-, or polycyclic, preferably mono-, bi-, or tricyclic, more preferably mono- or bicyclic. The term “heterocyclylalkyl” refers to an alkyl group substituted by a heterocyclyl, wherein the alkyl and heterocyclyl portions independently are optionally substituted. A bicyclic heterocyclic ring also includes groups in which the heterocyclic ring is fused to one or more aryl, heteroaryl, or cycloaliphatic rings. Exemplary bicyclic heterocyclic groups include indolinyl, isoindolinyl, benzodioxolyl, 1,3-dihydroisobenzofuranyl, 2,3-dihydrobenzofuranyl, and tetrahydroquinolinyl. A bicyclic heterocyclic ring can also be a spirocyclic ring system (e.g., 7- to 11-membered spirocyclic fused heterocyclic ring having, in addition to carbon atoms, one or more heteroatoms as defined above (e.g., one, two, three or four heteroatoms)). A bicyclic heterocyclic ring can also be a bridged ring system (e.g., 7- to 11-membered bridged heterocyclic ring having one, two, or three bridging atoms.

[0364] As used herein, the term “linker” is used to refer to that portion of a multi-element agent that connects different elements to one another. For example, those of ordinary skill in the art appreciate that a polypeptide whose structure includes two or more functional or organizational domains often includes a stretch of amino acids between such domains that links them to one another. In some embodiments, a polypeptide comprising a linker element “L” has an overall structure of the general form S1-L′-S2, wherein S1 and S2 may be the same or different and represent two domains associated with one another by the linker. In some embodiments, a polypeptide linker is at least 2, 3, 4, 5, 6, 7, 8, 9, 10, 11, 12, 13, 14, 15, 16, 17, 18, 19, 20, 21, 22, 23, 24, 25, 26, 27, 28, 29, 30, 35, 40, 45, 50, 55, 60, 65, 70, 75, 80, 85, 90, 95, 100 or more amino acids in length. In some embodiments, a linker is characterized in that it tends not to adopt a rigid three-dimensional structure, but rather provides flexibility to the polypeptide. A variety of different linker elements that can appropriately be used when engineering polypeptides (e.g., fusion polypeptides) known in the art (see e.g., Holliger, P., et al. (1993) Proc. Natl. Acad. Sci. USA 90:6444-6448; Poljak, R. J., et al. (1994) Structure 2:1 121-1123).

[0365] The term “sterolyl,” as used herein, refers to a 17-membered fused polycyclic ring moiety that is either saturated or partially unsaturated and substituted with at least one hydroxyl group, and has a single point of attachment to the rest of the molecule at any substitutable carbon or oxygen atom. In some embodiments, a sterolyl group is a cholesterolyl group, or a variant or derivative thereof. In some embodiments, a cholesterolyl group is modified. In some embodiments, a cholesterolyl group is an oxidized cholesterolyl group (e.g., oxidized on the beta-ring structure or on the hydrocarbon tail structure). In some embodiments, a cholesterolyl group is an esterified cholesterolyl group. In some embodiments, a sterolyl group is a phytosterolyl group. Exemplary sterolyl groups include but are not limited to 25-hydroxycholesterolyl (25-OH), 20α-hydroxycholesterolyl (20α-OH), 27-hydroxycholesterolyl, 6-keto-5α-hydroxycholesterolyl, 7-ketocholesterolyl, 7β-hydroxycholesterolyl, 7α-hydroxycholesterolyl, 7β-25-dihydroxycholesterolyl, beta-sitosterolyl, stigmasterolyl, brassicasterolyl, and campesterolyl.

[0366] As described herein, compounds of this disclosure may be described as “substituted” or “optionally substituted”. That is, compounds may contain optionally substituted and/or substituted moieties. In general, the term “substituted,” whether preceded by the term “optionally” or not, means that one or more hydrogens of the designated moiety are replaced with a suitable substituent. “Substituted” applies to one or more hydrogens that are either explicit or implicit from the structure (e.g.,

[chemical structure]

refers to at least

[chemical structure]

refers to at least

[chemical structure]

Unless otherwise indicated, an “optionally substituted” group may have a suitable substituent at each substitutable position of the group, and when more than one position in any given structure may be substituted with more than one substituent selected from a specified group, the substituent may be either the same or different at every position. Combinations of substituents envisioned by this disclosure are preferably those that result in the formation of stable or chemically feasible compounds. The term “stable,” as used herein, refers to compounds that are not substantially altered when subjected to conditions to allow for their production, detection, and, in certain embodiments, their recovery, purification, and use for one or more of the purposes disclosed herein. Groups described as being “substituted” preferably have between 1 and 4 substituents, more preferably 1 or 2 substituents. Groups described as being “optionally substituted” may be unsubstituted or be “substituted” as described above.

[0367] Suitable monovalent substituents include halogen; —(CH₂)₀₋₄R^{∘}; —(CH₂)₀₋₄OR^{∘}; —O(CH₂)₀₋₄R^{∘}, —O—(CH₂)₀₋₄C(O)OR^{∘}; —(CH₂)₀₋₄CH(OR^{∘})₂; —(CH₂)₀₋₄Ph, which may be substituted with R^{∘}; —(CH₂)₀₋₄O(CH₂)₀₋₁Ph which may be substituted with R^{∘}; —CH═CHPh, which may be substituted with R^{∘}; —(CH₂)₀₋₄O(CH₂)₀₋₁-pyridyl which may be substituted with R^{∘}; —NO₂; —CN; —N₃; —(CH₂)₀₋₄N(R^{∘})₂; —(CH₂)₀₋₄N(R^{∘})C(O)R^{∘}; —N(R^{∘})C(S)R^{∘}; —(CH₂)₀₋₄N(R^{∘})C(O)NR^{∘}₂; —N(R^{∘})C(S)NR^{∘}₂; —(CH₂)₀₋₄N(R^{∘})C(O)OR^{∘}; —N(R^{∘})N(R^{∘})C(O)R^{∘}; —N(R^{∘})N(R^{∘})C(O)NR^{∘}₂; —N(R^{∘})N(R^{∘})C(O)OR^{∘}; —(CH₂)₀₋₄C(O)R^{∘}; —C(S)R^{∘}; —(CH₂)₀₋₄C(O)OR^{∘}; —(CH₂)₀₋₄C(O)SR^{∘}; —(CH₂)₀₋₄C(O)OSiR^{∘}₃; —(CH₂)₀₋₄OC(O)R^{∘}; —OC(O) (CH₂)₀₋₄SR^{∘}—, —SC(S)SR^{∘}; —(CH₂)₀₋₄SC(O)R^{∘}; —(CH₂)₀₋₄C(O)NR^{∘}₂; —C(S)NR^{∘}₂; —C(S)SR^{∘}; —SC(S)SR^{∘}, —(CH₂)₀₋₄OC(O)NR^{∘}₂; —C(O)N(OR^{∘})R^{∘}; —C(O)C(O)R^{∘}; —C(O)CH₂C(O)R^{∘}; —C(NOR^{∘})R^{∘}; —(CH₂)₀₋₄SSR^{∘}; —(CH₂)₀₋₄S(O)₂R^{∘}; —(CH₂)₀₋₄S(O)₂OR^{∘}; —(CH₂)₀₋₄OS(O)₂R^{∘}; —S(O)₂NR^{∘}₂; —(CH₂)₀₋₄S(O)R^{∘}; —N(R^{∘})S(O)₂NR^{∘}₂; —N(R^{∘})S(O)₂R^{∘}; —N(OR^{∘})R^{∘}; —C(NH)NR^{∘}₂; —P(O)₂R^{∘}; —P(O)R^{∘}₂; —OP(O)R^{∘}₂; —OP(O)(OR^{∘})₂; —SiR^{∘}₃; —OSiR^{∘}₃; —(C₁₋₄ straight or branched alkylene)O—N(R^{∘})₂; or —(C₁₋₄ straight or branched alkylene)C(O)O—N(R^{∘})₂, wherein each R^{∘} may be substituted as defined below and is independently hydrogen, C₁₋₆ aliphatic, —CH₂Ph, —O(CH₂)₀₋₁Ph, —CH₂-(5-6 membered heteroaryl ring), or a 5-6-membered saturated, partially unsaturated, or aryl ring having 0-4 heteroatoms independently selected from nitrogen, oxygen, or sulfur, or, notwithstanding the definition above, two independent occurrences of R^{∘}, taken together with their intervening atom(s), form a 3-12-membered saturated, partially unsaturated, or aryl mono- or bicyclic ring having 0-4 heteroatoms independently selected from nitrogen, oxygen, or sulfur, which may be substituted as defined below.

[0368] Suitable monovalent substituents on R^{∘} (or the ring formed by taking two independent occurrences of R^{∘} together with their intervening atoms), are independently halogen, —(CH₂)₀₋₂R^{●}, -(haloR^{●}), —(CH₂)₀₋₂OH, —(CH₂)₀₋₂OR^{●}, —(CH₂)₀₋₂CH(OR^{●})₂; —O(haloR^{●}), —CN, —N3, —(CH₂)₀₋₂C(O)R^{●}, —(CH₂)₀₋₂C(O)OH, —(CH₂)₀₋₂C(O)OR^{●}, —(CH₂)₀₋₂C(O)NH₂, —(CH₂)₀₋₂C(O)NHR^{●}, —(CH₂)₀₋₂C(O)NR^{●}₂, —(CH₂)₀₋₂SR^{●}, —(CH₂)₀₋₂SH, —(CH₂)₀₋₂NH₂, —(CH₂)₀₋₂NHR^{●}, —(CH₂)₀₋₂NR^{●}₂, —NO₂, —SiR^{●}₃, —OSiR^{●}₃, —C(O)SR^{●}, —(C₁₋₄ straight or branched alkylene)C(O)OR^{●}, or —SSR^{●} wherein each R^{●} is unsubstituted or where preceded by “halo” is substituted only with one or more halogens, and is independently selected from C₁₋₄ aliphatic, —CH₂Ph, —O(CH₂)₀₋₁Ph, or a 5-6-membered saturated, partially unsaturated, or aryl ring having 0-4 heteroatoms independently selected from nitrogen, oxygen, or sulfur. Suitable divalent substituents on a saturated carbon atom of R^{∘} include ═O and ═S.

[0369] Suitable divalent substituents include the following: ═O, ═S, ═NNR*₂, ═NNHC(O)R*, ═NNHC(O)OR*, ═NNHS(O)₂R*, ═NR*, ═NOR*, —O(C(R*₂)₂₋₃O—, or —S(C(R*₂)₂₋₃S—, wherein each independent occurrence of R* is selected from hydrogen, C₁₋₆ aliphatic which may be substituted as defined below, or an unsubstituted 5-6-membered saturated, partially unsaturated, or aryl ring having 0-4 heteroatoms independently selected from nitrogen, oxygen, or sulfur. Suitable divalent substituents that are bound to vicinal substitutable carbons of an “optionally substituted” group include: —O(CR*₂)₂₋₃O—, wherein each independent occurrence of R* is selected from hydrogen, C₁₋₆ aliphatic which may be substituted as defined below, or an unsubstituted 5-6-membered saturated, partially unsaturated, or aryl ring having 0-4 heteroatoms independently selected from nitrogen, oxygen, or sulfur.

[0370] Suitable substituents on the aliphatic group of R* include halogen, —R^{●}, -(haloR^{●}), —OH, —OR^{●}, —O(haloR^{●}), —CN, —C(O)OH, —C(O)OR^{●}, —NH₂, —NHR^{●}, —NR^{●}₂, or —NO₂, wherein each R^{●} is unsubstituted or where preceded by “halo” is substituted only with one or more halogens, and is independently C₁₋₄ aliphatic, —CH₂Ph, —O(CH₂)₀₋₁Ph, or a 5-6-membered saturated, partially unsaturated, or aryl ring having 0-4 heteroatoms independently selected from nitrogen, oxygen, or sulfur.

[0371] In some embodiments, suitable substituents on a substitutable nitrogen include —R^{†}, —NR^{†}₂, —C(O)R^{†}, —C(O)OR^{†}, —C(O)C(O)R^{†}, —C(O)CH₂C(O)R^{†}, —S(O)₂R^{†}, —S(O)₂NR^{†}₂, —C(S)NR^{†}₂, —C(NH)NR^{†}₂, or —N(R^{†})S(O)₂R^{†}; wherein each Rt is independently hydrogen, C₁₋₆ aliphatic which may be substituted as defined below, unsubstituted —OPh, or an unsubstituted 5-6-membered saturated, partially unsaturated, or aryl ring having 0-4 heteroatoms independently selected from nitrogen, oxygen, or sulfur, or, notwithstanding the definition above, two independent occurrences of Rt, taken together with their intervening atom(s) form an unsubstituted 3-12-membered saturated, partially unsaturated, or aryl mono- or bicyclic ring having 0-4 heteroatoms independently selected from nitrogen, oxygen, or sulfur.

[0372] Suitable substituents on the aliphatic group of R^{†} are independently halogen, —R^{●}, -(haloR^{●}), —OH, —OR^{●}, —O(haloR^{●}), —CN, —C(O)OH, —C(O)OR^{●}, —NH₂, —NHR^{●}, —NR^{●}₂, or —NO₂, wherein each R^{●} is unsubstituted or where preceded by “halo” is substituted only with one or more halogens, and is independently C₁₋₄ aliphatic, —CH₂Ph, —O(CH₂)₀₋₁Ph, or a 5-6-membered saturated, partially unsaturated, or aryl ring having 0-4 heteroatoms independently selected from nitrogen, oxygen, or sulfur.

[0373] As used herein, amino lipids can contain at least one primary, secondary, or tertiary amine moiety that is protonatable (or ionizable) between pH range 4 and 14. In some embodiments, the amine moiety/moieties function as the hydrophilic headgroup of the amino lipids. When most of the amine moiety(ies) of an amino lipid (or amino lipids) in a nucleic acid-lipid nanoparticle formulation is protonated at physiological pH, then the nanoparticles can be termed as cationic lipid nanoparticle (cLNP). When most of the amine moiety(ies) of an amino lipid (or amino lipids) in a nucleic acid-lipid nanoparticle formulation is not protonated at physiological pH but can be protonated at acidic pH, endosomal pH for example, can be termed as ionizable lipid nanoparticle (iLNP). The amino lipids that constitute cLNPs can be generally called cationic amino lipids (cLipids). The amino lipids that constitute iLNPs can be called ionizable amino lipids (iLipids). The amino lipid can be an iLipid or a cLipid at physiological pH.

[0374] As used herein, LNP compositions or formulations are typically sized on the order of micrometers or smaller and may include a lipid bilayer. Nanoparticle compositions encompass lipid nanoparticles (LNPs), liposomes lipid vesicles), and lipoplexes nanoparticle composition a liposome having a lipid bilayer with a diameter of 500 nm or less. The LNPs described herein can have a mean diameter of from about 1 nm to about 2500 nm, from about 10 nm to about 1500 nm, from about 20 nm to about 1000 nm, from about 30 nm to about 150 nm, from about 40 nm to about 150 nm, from about 50 nm to about 150 nm, from about 60 nm to about 130 nm, from about 70 nm to about 110 nm, from about 70 nm to about 100 nm, from about 80 nm to about 100 nm, from about 90 nm to about 100 nm, from about 70 to about 90 nm, from about 80 nm to about 90 nm or from about 70 nm to about 80 nm. The LNPs described herein can have a mean diameter of about 30 nm, 35 nm, 40 nm, 45 nm, 50 nm, 55 nm, 60 nm, 65 nm, 70 nm, 75 nm, 80 nm, 85 nm, 90 nm, 95 nm, 100 nm, 105 nm, 110 nm, 115 nm, 120 nm, 125 nm, 130 nm, 135 nm, 140 nm, 145 nm, 150 nm, or greater. The LNPs described herein can be substantially non-toxic.

[0375] As used herein, a “phospholipid” can refer to a lipid that includes a phosphate moiety and one or more carbon chains, such as unsaturated fatty acid chains. A phospholipid may include one or more multiple (e.g., double or triple) bonds. In some embodiments, a phospholipid may facilitate fusion to a membrane. For example, a cationic phospholipid may interact with one or more negatively charged phospholipids of a membrane (e.g., a cellular or intracellular membrane). Fusion of a phospholipid to a membrane may allow one or more elements of an LNP to pass through the membrane, i.e., delivery of the one or more elements to a cell.

### Payload

[0376] The LNPs described herein can be designed to deliver a payload, such as one or more therapeutic agent(s) or drug substances(s) to a target cell or organ of interest. In some embodiments, a LNP described herein encloses one or more components of a base editor system as described herein. For example, a LNP may enclose one or more of a guide RNA, a nucleic acid encoding the guide RNA, a vector encoding the guide RNA, a base editor fusion protein, a nucleic acid encoding the base editor fusion protein, a programmable DNA binding domain, a nucleic acid encoding the programmable DNA binding domain, a deaminase, a nucleic acid encoding the deaminase, or all or any combination thereof. In some embodiments, the nucleic acid is a DNA. In some embodiments, the nucleic acid is a RNA, for example, a mRNA and/or a guide RNA. In some embodiments, the said nucleic acid(s) is/are chemically modified.

[0377] In some embodiments, the payload comprises one or more nucleic acid(s) (i.e., one or more nucleic acid molecular entities). In some embodiments, the nucleic acid is a single-stranded nucleic acid. In some embodiments, single-stranded nucleic acid is a DNA. In some embodiments, single-stranded nucleic acid is an RNA. In some embodiments, the nucleic acid is a double-stranded nucleic acid. In some embodiments, the double-stranded nucleic acid is a DNA. In some embodiments, the double-stranded nucleic acid is an RNA. In some embodiments, the double-stranded nucleic acid is a DNA-RNA hybrid. In some embodiments, the nucleic acid is a messenger RNA (mRNA), a microRNA, an asymmetrical interfering RNA (aiRNA), a small hairpin RNA (shRNA), an antisense oligonucleotide, or a Dicer-Substrate dsRNA. In some embodiments, the single-stranded nucleic acids form secondary structure, one or more stem-loops for example. In some other embodiments, the single stranded nucleic acids contain one or more stem-loops and single-stranded regions within the molecule.

### Kits

[0378] It is contemplated herein that the therapeutic agents or drug substances disclosed herein are part of a kit as described herein. Accordingly, one aspect of the disclosure relates to kits including the compositions comprising a single guide RNA as provided herein, the base editor system and complex as provided herein, the composition as provided herein, and/or the lipid nanoparticle formulations as provided herein for treating or preventing a condition. The kits can further include one or more additional therapeutic regimens or agents for treating or preventing a condition.

[0379] Also disclosed herein, in certain embodiments, are kits and articles of manufacture for use with one or more methods described herein. Such kits include a carrier, package, or container that is compartmentalized to receive one or more containers such as vials, tubes, and the like, each of the container(s) comprising one of the separate elements to be used in a method described herein. Suitable containers include, for example, bottles, vials, syringes, and test tubes. In one embodiment, the containers are formed from a variety of materials such as glass or plastic.

[0380] The articles of manufacture provided herein contain packaging materials. Examples of pharmaceutical packaging materials include, but are not limited to, blister packs, bottles, tubes, bags, containers, bottles, and any packaging material suitable for a selected formulation and intended mode of administration and treatment.

[0381] For example, the container(s) include a composition as described herein, and optionally in addition with therapeutic regimens or agents disclosed herein. Such kits optionally include an identifying description or label or instructions relating to its use in the methods described herein.

[0382] A kit typically includes labels listing contents and/or instructions for use, and package inserts with instructions for use. A set of instructions will also typically be included.

[0383] In embodiments, a label is on or associated with the container. In one embodiment, a label is on a container when letters, numbers or other characters forming the label are attached, molded, or etched into the container itself; a label is associated with a container when it is present within a receptacle or carrier that also holds the container, e.g., as a package insert. In one embodiment, a label is used to indicate that the contents are to be used for a specific therapeutic application. The label also indicates directions for use of the contents, such as in the methods described herein.

### Dosing

[0384] The skilled artisan will appreciate that certain factors may influence the dosage and frequency of administration required to effectively treat a subject, including but not limited to the severity of the disease or disorder, previous treatments, the general characteristics of the subject including health, sex, weight and/or age of the subject, and other diseases present. Moreover, treatment of a subject with a therapeutically effective amount of the compositions can include a single treatment or can include a series of treatments. It will also be appreciated that the effective dosage of the composition of the disclosure used for treatment may increase or decrease over the course of a particular treatment. Changes in dosage may result and become apparent from the results of diagnostic assays as described herein. The therapeutically effective dosage will generally be dependent on the patient's status at the time of administration. The precise amount can be determined by routine experimentation but may ultimately lie with the judgment of the clinician, for example, by monitoring the patient for signs of disease and adjusting the treatment accordingly.

[0385] Frequency of administration may be determined and adjusted over the course of therapy, and is generally, but not necessarily, based on treatment and/or suppression and/or amelioration and/or delay of a disease. Alternatively, sustained continuous release formulations of a polypeptide or a polynucleotide may be appropriate.

[0386] The dosing regimen (including a composition disclosed herein) can vary over time. The particular dosage regimen, i.e., dose, timing, and repetition, will depend on the particular subject and that subject's medical history, as well as the properties of the polypeptide or the polynucleotide (such as the half-life of the polypeptide or the polynucleotide, and other considerations well known in the art).

[0387] The appropriate therapeutic dosage of a composition as described herein will depend on the specific agent (or compositions thereof) employed, the formulation and route of administration, the type and severity of the disease, whether the polypeptide or the polynucleotide is administered for preventive or therapeutic purposes, previous therapy, the subject's clinical history and response to the antagonist, and the discretion of the attending physician. Typically, the clinician will administer a polypeptide until a dosage is reached that achieves the desired result.

[0388] Administration of one or more compositions can be continuous or intermittent, depending, for example, upon the recipient's physiological condition, whether the purpose of the administration is therapeutic or prophylactic, and other factors known to skilled practitioners. The administration of a composition may be essentially continuous over a preselected period of time or may be in a series of spaced dose, e.g., either before, during, or after developing a disease.

[0389] The methods and compositions of the disclosure described herein including embodiments thereof can be administered with one or more additional therapeutic regimens or agents or treatments, which can be co-administered to the mammal. By “co-administering” is meant administering one or more additional therapeutic regimens or agents or treatments and the composition of the disclosure sufficiently close in time to enhance the effect of one or more additional therapeutic agents, or vice versa. In this regard, the composition of the disclosure described herein can be administered simultaneously with one or more additional therapeutic regimens or agents or treatments, at a different time, or on an entirely different therapeutic schedule (e.g., the first treatment can be daily, while the additional treatment is weekly). For example, in embodiments, the secondary therapeutic regimens or agents or treatments are administered simultaneously, prior to, or subsequent to the composition of the disclosure.

[0390] In embodiments, a polynucleotide encoding a base editor fusion protein and a guide RNA are administered to a subject. In embodiments, the polynucleotide encoding the base editor fusion protein is an mRNA. In embodiments, a LNP comprising such amounts of the polynucleotide encoding a base editor fusion protein and the guide RNA are administered to the subject. In embodiments, the subject is a primate. In embodiments, the subject is a non-human primate. In embodiments, the non-human primate is a cynomolgus monkey.

[0391] In embodiments, administration of the guide RNA and the polynucleotide encoding the base editor fusion protein to a non-human primate, such as a cynomolgus monkey results base alteration in 20% or more, 25% or more, 30% or more, 35% or more, 40% or more, 45% or more 50% or more, 55% or more, or 60% or more whole liver cells as measured by next generation sequencing. In embodiments, such base alteration percentages are achieved when the subject is administered a combined dose of the guide RNA and the polynucleotide encoding the base editor fusion protein. In embodiments, such doses are administered in LNPs. In embodiments, such administration results in reduced serum TTR levels.

[0392] The present invention is illustrated by the following examples. It is to be understood that the particular examples, materials, amounts, and procedures are to be interpreted broadly in accordance with the scope and spirit of the invention as set forth herein.

### EXAMPLES

### Example 1

### Guides for Adenine Base Editing of the TTR Gene

[0393] With this example, gRNA sequences were identified that permit ABE8.8 (and other ABE variants containing Streptococcus pyogenes Cas9, such as ABE7.10, or another Cas protein that can use the NGG PAM) to either: 1) disrupt the start codon, or 2) disrupt splice sites, whether donors or acceptors, via A→G editing within its editing window (roughly positions 4 to 7 in the 20-nt protospacer region of DNA). Five sequences were identified throughout the human TTR gene (Table 1). gRNAs were synthesized matching each of the protospacer sequences and otherwise conforming to the standard 100-nt Streptococcus pyogenes CRISPR gRNA sequence, with each gRNA molecule having a minimal degree of chemical modifications (specified in Table 1). Each of the gRNAs was co-transfected with an equivalent amount of in vitro transcribed ABE8.8 mRNA (1:1 ratio by molecular weight) into primary human hepatocytes via MessengerMax reagent (Lipofectamine), using various dilutions (2500, 1250, 625 ng/RNA/mL) to assess for editing activity at different concentrations of test article.

TABLE 1
TTR Guides

| gRNA | | Protospacer | |
|---|---|---|---|
| ID | Species | (5′-3′) | gRNA sequence (5′-3′) |
| GA457 | Human | GCCATCCTG | gscscsAUCCUGCCAAGAAUGAGGUUUUAGAGCUAGAAA |
| | | CCAAGAATG | UAGCAAGUUAAAAUAAGGCUAGUCCGUUAUCAACUUGAA |
| | | AG (SEQ | AAAGUGGCACCGAGUCGGUGCUsususu (SEQ ID |
| | | ID NO : | NO: 11) |
| | | 24) | |
| GA519 | Cyno | GCCATCCTG | gscscsAUCCUGCCAAGAACGAGgUUUUAGagcuaGaaa |
| | | CCAAGAACG | uagcaaGUUaAaAuAaggcuaGUccGUUAucAAcuuGaa |
| | | AG (SEQ | aaagugGcaccgagucggugcuususus (SEQ ID |
| | | ID NO : | NO: 16) |
| | | 28) | |
| GA458 | Cyno | GCCATCCTG | gscscsAUCCUGCCAAGAACGAGGUUUUAGAGCUAGAAA |
| | | CCAAGAACG | UAGCAAGUUAAAAUAAGGCUAGUCCGUUAUCAACUUGAA |
| | | AG (SEQ | AAAGUGGCACCGAGUCGGUGCUsususu (SEQ ID |
| | | ID NO : | NO: 29) |
| | | 28) | |
| GA459 | Human | GCAACTTAC | gscsasACUUACCCAGAGGCAAAGUUUUAGAGCUAGAAA |
| | | CCAGAGGCA | UAGCAAGUUAAAAUAAGGCUAGUCCGUUAUCAACUUGAA |
| | | AA (SEQ | AAAGUGGCACCGAGUCGGUGCUsususu (SEQ ID |
| | | ID NO: | NO: 13) |
| | | 25) | |
| GA460 | Human/ | TATAGGAAA | usasusAGGAAAACCAGUGAGUCGUUUUAGAGCUAGAAA |
| | Cyno | ACCAGTGAG | UAGCAAGUUAAAAUAAGGCUAGUCCGUUAUCAACUUGAA |
| | | TC (SEQ | AAAGUGGCACCGAGUCGGUGCUsususu (SEQ ID |
| | | ID NO : | NO: 14) |
| | | 26) | |
| GA520 | Human/ | TATAGGAAA | usasusAGGAAAACCAGUGAGUCgUUUUAGagcuaGaaa |
| | Cyno | ACCAGTGAG | uagcaaGUUaAaAuAaggcuaGUccGUUAucAAcuuGaa |
| | | TC (SEQ | aaagugGcaccgagucggugcuususus (SEQ ID |
| | | ID NO : | NO: 17) |
| | | 26) | |
| GA461 | Human/ | TACTCACCT | usascsUCACCUCUGCAUGCUCAGUUUUAGAGCUAGAAA |
| | Cyno | CTGCATGCT | UAGCAAGUUAAAAUAAGGCUAGUCCGUUAUCAACUUGAA |
| | | CA (SEQ | AAAGUGGCACCGAGUCGGUGCUsususu (SEQ ID |
| | | ID NO: | NO: 15) |
| | | 27) | |
| GA521 | Human | GCCATCCTG | gscscsAUCCUGCCAAGAAUGAGmGUUUUAGmAmGmCmU |
| | | CCAAGAATG | mAGmAmAmAmUmAmGmCmAmAGUUmAAmAAmUAmAmGmG |
| | | AG (SEQ | mCmUmAGUmCmCGUUAmUmCAAmCmUmUGmAmAmAmAmA |
| | | ID NO : | mGmUmGGmCmAmCmCmGmAmGmUmCmGmGmUmGmCmU*m |
| | | 24) | U*mU*mU (SEQ ID NO: 11) |

Letters in the sequences:-A: adenosine; C: cytidine; G: guanosine; U: uridine; a: 2′-O-methyladenosine; c: 2′-O-methylcytidine; g: 2′-O-methylguanosine; u: 2′-O-methyluridine; and s: phosphorothioate (PS) backbone linkage.
Bold type in gRNA sequence denotes spacer sequence corresponding to Protospacer.
GA460 and GA520 have the same protospacer sequence but have different chemical modifications in the gRNA sequence.

[0394] For orthogonal protospacer sequences of the corresponding cynomolgus monkey TTR gene sequence, each gRNA was also transfected with an equivalent amount of ABE8.8 mRNA (1:1 ratio by molecular weight) into primary cynomolgus hepatocytes at 5000, 2500, 1250, 625, 312.5, and 156.25 ng/RNA/mL. The mRNA, and corresponding amino acid, sequence of the ABE8.8 (MA004) used in shown below in Table 11. Three days after transfection, genomic DNA was harvested from the hepatocytes, and assessed for base editing with next-generation sequencing of PCR amplicons generated around the target splice site. Several sites exhibited high editing efficiency. In particular, GA457 (GA458 is the cynomolgus equivalent), GA460, and GA461 showed high editing activity in both human and cynomolgus primary hepatocytes. See FIGS. 5A-5C, FIG. 6, and Tables 2-3.

TABLE 2
Editing activity in human primary hepatocytes

| | | Human hepatocytes- Editing % | | | | | |
|---|---|---|---|---|---|---|---|
| | | 2500, | 2500, | 1250, | 1250, | 625, | 625, |
| gRNA ID | Protospacer (5′-3′) | rep 1 | rep 2 | rep 1 | rep 2 | rep 1 | rep 2 |
| GA457 | GCCATCCTGCCAAGAATGAG | 33.96 | 31.31 | 26.49 | 24.86 | 17.24 | 15.39 |
| | (SEQ ID NO: 24) | | | | | | |
| GA459 | GCAACTTACCCAGAGGCAAA | 8.5 | 8.69 | 5.46 | 6.15 | 3.79 | 3.89 |
| | (SEQ ID NO: 25) | | | | | | |
| GA460 | TATAGGAAAACCAGTGAGTC | 47.61 | 47.79 | 38.33 | 35.8 | 23.77 | 22.27 |
| | (SEQ ID NO: 26) | | | | | | |
| GA461 | TACTCACCTCTGCATGCTCA | 40.42 | 39.43 | 32.82 | 32.38 | 21.81 | 22.31 |
| | (SEQ ID NO: 27) | | | | | | |

TABLE 3
Editing activity in cyno primary hepatocytes

| | | Cyno hepatocytes- Editing % | | | | | |
|---|---|---|---|---|---|---|---|
| gRNA ID | Protospacer (5′-3′) | 5000 | 2500 | 1250 | 625 | 312.5 | 156.25 |
| GA458 | GCCATCCTGCCAAGAACGAG | 35.91 | 27.25 | 22.74 | 16.07 | 10.65 | 6.06 |
| | (SEQ ID NO: 28) | | | | | | |
| GA460 | TATAGGAAAACCAGTGAGTC | 40.16 | 38.25 | 31.71 | 18.44 | 11.22 | 1.62 |
| | (SEQ ID NO: 26) | | | | | | |
| GA461 | TACTCACCTCTGCATGCTCA | 37.53 | 29.8 | 19.46 | 13.16 | 7.45 | 0.07 |
| | (SEQ ID NO: 27) | | | | | | |

[0395] Results presented in Tables 2 and 3 are to be understood to be representative of results that may be achieved in accordance with the teachings provided herein. Compositions for editing a TTR gene according to the invention may produce editing activity that varies from the activity set forth in Table 2 or Table 3 by 10% or more, 20% or more, 30% or more, 40% or more, 50% or more, 60% or more, 70% or more, 80% or more, 90% or more, or 100% or more. In some embodiments, the compositions provide editing activity that is within 100%, within 90%, within 80%, with 70%, within 60%, within 50%, within 40%, within 30% or more, within 20% or more, or within 10% of the activity as set forth in Table 2 or Table 3.

### Example 2

### Off Target Analysis

[0396] With a view towards establishing the safety of a base-editing therapy knocking down of TTR in the human liver in vivo, off-target mutagenesis analysis is assessed in primary human hepatocytes. Following the ONE-seq procedures detailed in PCT/US19/27788 (“Highly Sensitive in vitro Assays to Define Substrate Preferences and Sites of Nucleic-Acid Binding, Modifying, and Cleaving Agents”), off-target editing in human hepatocytes was assessed. A simplified flowchart of off-target analysis with the ONE-seq procedure is shown in FIG. 7. The in vitro biochemical assay ONE-seq was used to generate a list of candidate off-target sites and to determine the propensity of a ribonucleoprotein comprising the ABE8.8 base editor protein and each of the three protospacer guides sequences (GA457, GA460, and GA461) to cleave oligonucleotides in a library. The results from ONE-seq analysis of libraries generated for GA457, GA460, and GA461 are shown in Tables 8-10, with candidate off-target sites listed.

[0397] The methodology for ONE-seq is as follows: the design of a ONE-seq library starts with the computational identification of sites in a reference genome that have sequence homology to the on-target. For human ONE-seq libraries, the reference human genome (GRCh38, Ensembl v98, chromosomes ftp://ftp.ensembl.org/pub/release-98/fasta/homo_sapiens/dna/Homo_sapiens.GRCh38.dna.chromosome.{1-22,X,Y,MT}.fa and ftp://ftp.ensembl.org/pub/release-98/fasta/homo_sapiens/dna/Homo_sapiens.GRCh38.dna.nonchromosomal.fa), was searched for potential off-target sites with up to 6 mismatches to the protospacer sequence above, and sites with up to 4 mismatches plus up to 2 DNA or RNA bulges, using Cas-Designer v1.2 (http://www.rgenome.net/cas-designer/).

[0398] Sites with up to 6 mismatches and no bulges are referred to using a X<number of mismatches><number of bulges> code. As such, the on-target site is labelled as X00; a site with 1 mismatch to the on-target and no bulges is labelled as X10, and so on. Sites with DNA bulges are referred to with a similar nomenclature, DNA<number of mismatches><number of bulges>. As such, a site with 4 mismatches to the on-target and 2 DNA bulges is labelled as DNA42. The same nomenclature is used for RNA bulges, but these are coded as RNA<number of mismatches><number of bulges>.

[0399] The protospacer sequences identified were extended by 10 nucleotides (nt) on both sides with adjacent sequence from the respective reference genome (these regions are herein referred to as the genomic context). These extended sequences were then padded by additional sequences up to a final length of approximately 200 nt, including 6 predefined constant regions of different nucleotide composition and sequence length; 2 copies of a 14-nt site-specific barcode, one on each side of the central protospacer sequence; and 2 distinct 11-nt unique molecular identifiers (UMIs), one on each side of the central protospacer sequence. The UMIs are used to correct for bias from PCR amplification, and the barcodes allow for the unambiguous identification of each site during analysis. The barcodes are selected from an initial list of 668,420 barcodes, which contain neither a CC nor a GG in their sequences, and each barcode has a Hamming distance of 2 from any other barcode. A custom Python script was used for designing the final library.

[0400] The final oligonucleotide libraries are synthesized by a commercial vendor (Agilent Technologies). Each library is PCR-amplified and subjected to 1.25×AMPure XP bead purification (Beckman Coulter). After incubation at 25° C. for 10 minutes in CutSmart buffer (New England Biolabs), RNP comprising 769 nM recombinant ABE8.8-m protein and 1.54 μM gRNA is mixed with 100 ng of the purified library and incubated at 37° C. for 8 hours. The RNP dose is derived from an analysis documenting that it is a super-saturating dose, ie, above the dose that achieves the maximum amount of on-target editing in the biochemical assay.

[0401] Proteinase K (New England Biolabs) is added to quench the reaction at 37° C. for 45 minutes, followed by 2×AMPure XP bead purification. The reaction is then serially incubated with EndoV (New England Biolabs) at 37° C. for 30 minutes, Klenow Fragment (New England Biolabs) at 37° C. for 30 minutes, and NEBNext Ultra II End Prep Enzyme Mix (New England Biolabs) at 20° C. for 30 minutes followed by 65° C. for 30 minutes, with 2×AMPure XP bead purification after each incubation. The reaction is ligated with an annealed adaptor oligonucleotide duplex at 20° C. for 1 hour to facilitate PCR amplification of the cleaved library products, followed by 2×AMPure XP bead purification. Size selection of the ligated reaction is performed on a PippinHT system (Sage Sciences) to isolate DNA of 150 to 200 bp on a 3% agarose gel cassette, followed by 2 rounds of PCR amplification to generate a barcoded library, which undergoes paired-end sequencing on an Illumina MiSeq System as described above.

[0402] Two cleavage products are obtained in a ONE-seq experiment. The PROTO side includes the part of the oligonucleotide upstream of the cleavage position, whereas the PAM side includes part of the oligonucleotide downstream of the cleavage position. In an ABE experiment, only the PROTO side is informative of editing activity (an A→G substitution); therefore, only this side is sequenced.

[0403] Paired-end reads were trimmed for sequencing adapters using trimmomatic v0.39 (Bolger et al., 2014) with custom Nextera adapters (PrefixPE/1: 5′-ACACTCTTTCCCTACACGACGCTCTTCCGATCT-3′ (SEQ ID NO: 30); PrefixPE/2: 5′-GTGACTGGAGTTCAGACGTGTGCTCTTCCGATCT-3′ (SEQ ID NO: 31); as specified in file) and parameters “ILLUMINACLIP:NEB_custom.fa:2:30:10:1:true LEADING:0 TRAILING:0 SLIDINGWINDOW:4:30 MINLEN:36”. For experiments with lower sequencing quality (VOL014), these parameters were set to “ILLUMINACLIP NEB_custom.fa:2:30:10:1:true LEADING:2 TRAILING:0 SLIDINGWINDOW:30:30 MINLEN:36”. Reads were then merged using FLASH v1.2.11 (Magoc and Salzberg, 2011) with parameters “--max-mismatch-density=0.25 --max-overlap=160”. Merged reads were scanned for the constant sequences, barcodes and protospacer sequences unique to each site, and filtered to those with evidence of an A→G substitution in the editing window (defined as the 1-10 most PAM-distal positions of the protospacer). Duplicated reads were discarded.

[0404] For each site, the total number of edited reads was normalized to the total number of edited reads assigned to the on-target site, and this ratio defines the ONE-seq score for the site. Sites were ranked by ONE-seq score, and those with a score equal to or larger than 0.001, were selected for validation. A score equal to or larger than 0.001 encompasses sites that have down to 1000-fold less editing activity in the biochemical assay compared to editing of the on-target site. This threshold is based on the premise that in cells, if there is 100% on-target editing, 1/1000-fold less editing activity would translate to <0.1% off-target editing, which falls below the lower limit of detection of editing by NGS. Oligonucleotides with higher sequence counts reflect a higher propensity for Cas9/gRNA cleavage in vitro and hence for greater potential of off-target mutagenesis in cells.

[0405] Several candidate off-target sites were analyzed for off-target editing in human primary hepatocytes. Table 4 shows the results from validating 47 candidate off-target sites for guide RNA GA457, from cells co-transfected with gRNA and an equivalent amount of in vitro transcribed ABE8.8 mRNA (1:1 ratio by molecular weight) into primary human hepatocytes via MessengerMax reagent (Lipofectamine). The on-target site has high editing efficiency, while all off-target sites show little to no editing (less than 0.4% net editing).

TABLE 4
GA457 validation against 47 potential off-target
candidate sites in human primary hepatocytes

| | | SEQ | % Editing-human primary | | |
|---|---|---|---|---|---|
| GA457 | | ID | hepatocytes | | |
| ID | Sequence (5′-3′) | NO: | Treated | Untreated | Net |
| On-target | GCCATCCTGCCAAGAATGAG | 24 | 54.21 | 0.11 | 54.1 |
| OT1 | GCCATCCTACCAGGAATGAA | 32 | 0.28 | 0.13 | 0.15 |
| OT2 | GCCATCTTGCCAAGAAAAAG | 33 | 0.12 | 0.09 | 0.03 |
| OT3 | GCCATACCTGCCATGAATGAG | 34 | 0.2 | 0.19 | 0.01 |
| OT4 | GCCATCCTGACAGGAATGAG | 35 | 0.24 | 0.38 | −0.14 |
| OT5 | ACCATCCTGCAAAGAATGAT | 36 | 0.18 | 0.24 | −0.06 |
| OT6 | GCCATCCAATAAGAATGAG | 37 | 0.69 | 0.32 | 0.37 |
| OT7 | GCCATCCTGACAAGTATGAG | 38 | 0.29 | 0.22 | 0.07 |
| OT8 | CCATACCTGCCAAGAATGAA | 39 | 0.18 | 0.15 | 0.03 |
| OT9 | TGCATCCTGCCAAAAATGGG | 40 | 0.06 | 0.08 | −0.02 |
| OT10 | TGCATCCTGCCAAGAAGAAG | 41 | 0.06 | 0.08 | −0.02 |
| OT11 | GCCATCCTCCAAGAATGCT | 42 | 0.13 | 0.13 | 0 |
| OT12 | GCCATCTGCAAGAAGGAG | 43 | 0.11 | 0.19 | −0.08 |
| OT13 | GCCATCCTATCAAGAATAAA | 44 | 0.22 | 0.2 | 0.02 |
| OT14 | TCCATCCTGTAAGAATGAG | 45 | 0.03 | 0.05 | −0.02 |
| OT15 | GGCCATCTGCCAAGAAGGAT | 46 | 0.12 | 0.13 | −0.01 |
| OT16 | ACCATCCTGCCAGCAATGTG | 47 | 0.17 | 0.12 | 0.05 |
| OT17 | TCCATCCTACTAAGAATGAG | 48 | 0.11 | 0.13 | −0.02 |
| OT18 | GGTATCCTGCCAAGAATGGA | 49 | 0.09 | 0.1 | −0.01 |
| OT19 | TCCATCCTGCCAAGAATTGC | 50 | 0.14 | 0.07 | 0.07 |
| OT20 | GCCATCTGCAAGAATGAG | 51 | 0.15 | 0.18 | −0.03 |
| OT21 | GCCATCCTGCAAATATGAG | 52 | 0.04 | 0.07 | −0.03 |
| OT22 | ACCATCCTGTCAAGAATCAA | 53 | 0.2 | 0.15 | 0.05 |
| OT23 | GCCATACTAACAAGAATGAG | 54 | 0.25 | 0.23 | 0.02 |
| OT24 | GTGATCCTGCCAGGAATAAG | 55 | 0.08 | 0.11 | −0.03 |
| OT25 | GCCATCAAGCAAGAATGAG | 56 | 0.3 | 0.27 | 0.03 |
| OT26 | GCCATCCTCACAAGTATGAG | 57 | 0.19 | 0.22 | −0.03 |
| OT27 | ACCATCCAGCAAGAATGAG | 58 | 0.43 | 0.32 | 0.11 |
| OT28 | GCCATATGCCAAAAAGGAG | 59 | 0.24 | 0.24 | 0 |
| OT29 | GACATCCTGTCAAGGATCAG | 60 | 0.21 | 0.16 | 0.05 |
| OT30 | GCCATAGCCAAAAATGAA | 61 | 0.18 | 0.27 | −0.09 |
| OT31 | GCCATAAGCCAAAGAATGAC | 62 | 0.09 | 0 | 0.09 |
| OT32 | GCCATCCTAACAAGTATGAG | 63 | 0.25 | 0.45 | −0.2 |
| OT33 | CATATCCTGCCAGAATGAG | 64 | 0.15 | 0.21 | −0.06 |
| OT34 | TACATCCTACCAAGGAATCAG | 65 | 0.29 | 0.26 | 0.03 |
| OT35 | CCCATCCTGCCAAGAAGTGT | 66 | 0.08 | 0.06 | 0.02 |
| OT36 | GCCATCCTACAAAAATGAG | 67 | 0.16 | 0.21 | −0.05 |
| OT37 | GTCATCCTGCCAGGAATGAA | 68 | 0.09 | 0.07 | 0.02 |
| OT38 | GCCATATCTGCCAAGAATGCG | 69 | 0.16 | 0.16 | 0 |
| OT39 | TCCATCCTGTCAAGAATGTG | 70 | 0.05 | 0.04 | 0.01 |
| OT40 | TCCATCCTCCAGAATGAG | 71 | 0.07 | 0.08 | −0.01 |
| OT41 | GCCATGCTGCCAAGAATGAT | 72 | 0.15 | 0.16 | −0.01 |
| OT42 | GCTATCCTGCCAGAATGAG | 73 | 0.07 | 0.07 | 0 |
| OT43 | TGCATCCTGACAAGAAATAG | 74 | 0.34 | 0.24 | 0.1 |
| OT44 | TCCATAGCCAAGAATGAG | 75 | 0.43 | 0.27 | 0.16 |
| OT45 | ACCATCTGTCAAGAATGAG | 76 | 0.26 | 0.21 | 0.05 |
| OT46 | GCCATCCCGCCAGGAATTAT | 77 | 0.08 | 0.07 | 0.01 |
| OT47 | ACCATCCTTCCAAGAAGATG | 78 | 0.14 | 0.12 | 0.02 |

[0406] GA459, GA460, and GA461 were similarly also assessed for off-target editing as shown in Tables 5, 6, and 7, respectively. While the on-target site, for each guide, shows high editing efficiency in the treated groups compared to the control groups, there is little to no off-target editing observed at candidate off-target sites.

TABLE 5
GA459 validation against 6 potential off-target candidate sites
in human primary hepatocytes

| | | SUM Editing %-Human Primary Hepatocytes | | | | |
|---|---|---|---|---|---|---|
| GA459 | | Treat | Treat | Untreated | Untreated | Untreated |
| ID | Sequence (5′-3′) | rep 1 | rep 2 | rep 1 | rep 2 | rep 3 |
| On- | GCAACTTACCCAGAGGCAAA | 14.17 | 14.29 | 0.67 | 0.57 | 0.73 |
| target | (SEQ ID NO: 25) | | | | | |
| OT1 | ACAAATTACCCAGAGGAAAA | 1.19 | 1.25 | 1.31 | 1.28 | 1.27 |
| | (SEQ ID NO: 79) | | | | | |
| OT3 | TCAACTTACCCAGAGTCAAA | 0.98 | 0.82 | 0.63 | 0.68 | 0.8 |
| | (SEQ ID NO: 80) | | | | | |
| OT4 | GCAACTTGCCCAGAGGCACA | 0.92 | 1.07 | 0.87 | 0.99 | 0.79 |
| | (SEQ ID NO: 81) | | | | | |
| OT5 | GCAACATACCCAGTGGCAAA | 1.07 | 0.91 | 0.87 | 0.86 | 0.92 |
| | (SEQ ID NO: 82) | | | | | |
| OT6 | GCAGCCTACCCAGAGGCAAA | 1.02 | 1.1 | 0.97 | 1 | 1.05 |
| | (SEQ ID NO: 83) | | | | | |
| OT7 | GCAACTCCCCCAGAGGCAAA | 1.45 | 1.4 | 1.25 | 1.13 | 1.37 |
| | (SEQ ID NO: 84) | | | | | |

TABLE 6
GA460 validation against 3 potential off-target candidate
sites in human primary hepatocytes

| | | SUM Editing %-Human Primary Hepatocytes | | | | |
|---|---|---|---|---|---|---|
| GA460 | | Treat | Treat | Untreated | Untreated | Untreated |
| ID | Sequence (5′-3′) | rep 1 | rep 2 | rep 1 | rep 2 | rep 3 |
| On- | TATAGGAAAACCAGTGAGTC | 76.4 | 74.3 | 1.54 | 1.17 | 1.41 |
| target | (SEQ ID NO: 26) | | | | | |
| OT1 | TAGAGGAAAACCAGTCAGTC | 1.44 | 1.6 | 1.51 | 1.35 | 1.61 |
| | (SEQ ID NO: 85) | | | | | |
| OT2 | CATAGGAAAACCAGTGAGTT | 5.67 | 6.6 | 1.18 | 0.98 | 1.24 |
| | (SEQ ID NO: 86) | | | | | |
| OT3 | TAAAGGAAAACCAGTGGGTC | 1.26 | 1.29 | 1.31 | 1.02 | 1.53 |
| | (SEQ ID NO: 87) | | | | | |

TABLE 7
GA461 validation against 4 potential off-target candidate
sites in human primary hepatocytes

| | | SUM Editing %- Human Primary Hepatocytes | | | | |
|---|---|---|---|---|---|---|
| GA461 | | Treat | Treat | Untreated | Untreated | Untreated |
| ID | Sequence (5′-3′) | rep 1 | rep 2 | rep 1 | rep 2 | rep 3 |
| On- | TACTCACCTCTGCATGCT | ND | 58.9 | 0.39 | 0.37 | 0.35 |
| target | CA (SEQ ID NO: 27) | | | | | |
| OT1 | TACACAACTGTGCATGCT | 0.93 | 0.95 | 0.89 | 0.86 | 0.82 |
| | CA (SEQ ID NO: 88) | | | | | |
| OT2 | TATTCACCTCTGCATGCT | 0.17 | 0.18 | 0.23 | 0.16 | 0.2 |
| | CT (SEQ ID NO: 89) | | | | | |
| OT3 | TACTTACCTCTGCTTGCT | 0.28 | 0.35 | 0.28 | 0.23 | 0.34 |
| | CA (SEQ ID NO: 90) | | | | | |
| OT4 | TACACACCTCTACATGCT | 0.67 | 0.94 | 0.75 | 0.62 | ND |
| | CA (SEQ ID NO: 91) | | | | | |

[0407] Table 8 provides some results for off-target editing with the GA457 guide.

[0408] Table 9 provides some results for off-target editing with the GA460 guide.

[0409] Table 10 provides some results for off-target editing with the GA461 guide.

[0410] Results presented in Tables 4, 6, 7, 8, 9, and 10 are to be understood to be representative of results that may be achieved in accordance with the teachings provided herein. Compositions for editing a TTR gene according to the invention may produce total off-target editing activity that varies from the activity set forth in Table 4, 6, 7, 8, 9, or 10 or discussed regarding GA457, 460, or 461. For example, the compositions may produce total off-target editing activity that varies from the activity set forth in Table 4, 6, 7, 8, 9, or 10 or discussed regarding GA457, 460, or 461 by 10% or more, 20% or more, 30% or more, 40% or more, 50% or more, 60% or more, 70% or more, 80% or more, 90% or more, or 100% or more, for one or more off target site set forth in Table 4, 6, 7, 8, 9, or 10 or discussed regarding GA457, 460, or 461. In some embodiments, the compositions provide total off-target editing activity that is within 100%, within 90%, within 80%, with 70%, within 60%, within 50%, within 40%, within 30% or more, within 20% or more, or within 10% of the activity as set forth in Table 4, 6, 7, 8, 9, or 10 or discussed regarding GA457, 460, or 461 for one or more site set forth in Table 4, 6, 7, 8, 9, or 10 or discussed regarding GA457, 460, or 461. In some embodiments, the compositions produce off-target editing activity that is less than or equal to the activity set forth in Table 4, 6, 7, 8, 9, or 10 or discussed regarding GA457, 460, or 461 for one or more site set forth in Table 4, 6, 7, 8, 9, or 10 or discussed regarding GA457, 460, or 461. In some embodiments, the compositions produce no off-target editing activity for one or more site set forth in Table 4, 6, 7, 8, 9, or 10 or discussed regarding GA457, 460, or 461.

TABLE 8
Some GA457 Candidate Off-target Sites

| | | | SEQ | |
|---|---|---|---|---|
| | | | ID | |
| Chromosome | Location | Sequence (5′-3′) | NO: | Alignment |
| 1 | 214915487 | TGCATCCTGCCAAAAATGGGGAG | 92 | X50 |
| 2 | 162088240 | GCCATCTTGCCAAGAAAAAGGGG | 161 | X30 |
| 3 | 143033429 | AACATCCTGCAAGAATAAGAAG | 255 | RNA41 |
| 4 | 148246005 | GCCATCCAATAAGAATGAGTGG | 314 | RNA31 |
| 5 | 171975758 | GTCATCCTGCCAAAATAAGGAGG | 381 | X60 |
| 6 | 11558428 | CCCATACAGCCAAGAATGAGAAA | 443 | X50 |
| 7 | 136711066 | TCCATCCTACTAAGAATGAGGAG | 490 | X40 |
| 8 | 64649745 | ACCATCCTGACAAGTGTGAGGCA | 601 | X60 |
| 9 | 13461786 | GTGATCCTGCCAGGAATAAGGAG | 602 | X50 |
| 10 | 84701101 | GCCACCCTCCAAGGATCTGAGG | 682 | RNA41 |
| 11 | 36962784 | GCCATACTAACAAGAATGAGGTG | 683 | X40 |
| 12 | 18423002 | GCCATCCTCAAGAATGGGAAA | 774 | RNA32 |
| 13 | 109466404 | ACCATCCTGTCAAGAATCAAGAG | 775 | X50 |
| 14 | 43842189 | GCCAACCTGACAAATGTGAGG | 842 | RNA32 |
| 15 | 38417527 | ACCATCCTTCCAAGAAGATGGGG | 843 | X50 |
| 16 | 19426632 | GCCATCCAGCCAAGCAAGAAGGG | 890 | X40 |
| 17 | 42774058 | GTCATCACTGCCAAGAACAAGAGG | 891 | DNA31 |
| 18 | 6852692 | GCCATCCTGTAAGAATAAGGAT | 941 | RNA41 |
| 19 | 55221349 | ACCATCCTGCCAGCAATGTGAGG | 942 | X40 |
| 20 | 56309168 | TCCATCCTGAAGAATGAATAG | 986 | RNA32 |
| 21 | 40793316 | GCCATATCTGCCAAGAATGCGGAG | 987 | DNA31 |
| 22 | 34535097 | GATATCCTCACAAGAATGAGTGA | 1009 | X50 |
| X | 54383781 | GCTCTACTGCCAAGAAAGTGG | 1068 | RNA32 |
| Y | 6961334 | GCCATCCACCAAGAAAGCGGAG | 331 | RNA41 |

[0411] Additional examples of GA457 off-target sites are presented in U.S. Provisional Patent Application No. 63/322,182, filed Mar. 21, 2022. The GA457 off-target sites may include any one of SEQ ID NOS: 92-1073.

TABLE 9
Some GA460 Candidate Off-target Sites

| | | | SEQ | |
|---|---|---|---|---|
| Chromosome | Location | Sequence | ID NO: | Alignment |
| 1 | 114689517 | TATAAGAAAACCAGTGTCTCTGG | 1074 | X30 |
| 2 | 165173430 | TATAGTGAACCAGTGAGGCAGG | 1280 | RNA31 |
| 3 | 56975861 | TGTAGAAAAACCAGTGAATAAGA | 1525 | X50 |
| 4 | 175627437 | GATAGGAAAACCATGAGGGGGT | 1892 | RNA41 |
| 5 | 115033087 | TATAGGAAACCAATGAGTGCTG | 1893 | RNA31 |
| 6 | 132497708 | TATAGGTAAACCAGAGTAGGC | 2232 | RNA32 |
| 7 | 40539970 | AGTAGGAAAACCAGTATATAGGG | 2233 | X60 |
| 8 | 77342779 | AATAGGAAAACCATTTTCAGG | 2494 | RNA32 |
| 9 | 73825991 | AATAGGAAAACCAGTAAAATAGG | 2495 | X50 |
| 10 | 112702031 | CATACGAAGTCCATGAGTCAGG | 2724 | RNA41 |
| 11 | 60264073 | ATATGGAAAACCAGAGAATCAGG | 2725 | X60 |
| 12 | 103497054 | GATAGAAACACCATGAATCAGG | 2957 | RNA41 |
| 13 | 31477698 | TATATGAAACCAGTAAGTTTGG | 2958 | RNA31 |
| 14 | 91758013 | TATAGGTGTAAACCAGTGTGCCTAG | 3137 | DNA42 |
| 15 | 28238271 | TATAGGAGAAACAGTGAATAGGA | 3138 | X50 |
| 16 | 74819495 | AAAATGTAAACCAGTAAGCCCGG | 3289 | X60 |
| 17 | 44943044 | TGTAGGAAGAACCAGTGGATCGGG | 3290 | DNA31 |
| 18 | 1915908 | AAAAGGAAAGCCAGTGACCTGG | 3410 | RNA41 |
| 19 | 44246762 | AAATAGAAAACCAGTAAGTCATG | 3411 | X60 |
| 20 | 24558049 | TATAGGAAAACAGGAACTCTGG | 3517 | RNA31 |
| 21 | 13185396 | TATAATAAAACCAGTGATAAGGG | 3518 | X50 |
| 22 | 38987774 | TGTAGGAAAACATATGATCAGG | 3574 | RNA41 |
| X | 134161037 | AATAGGATAACCAGTCAGTAGGG | 3575 | X40 |
| Y | 15254846 | TATAACATAACCAATAGGTCAGG | 3725 | X60 |

[0412] Additional examples of GA460 off-target sites are presented in U.S. Provisional Patent Application No. 63/322,182, filed Mar. 21, 2022. The GA460 off-target sites may include any one of SEQ ID NOS: 1074-3725.

TABLE 10
Some GA461 Candidate Off-target sites

| | | | SEQ ID | |
|---|---|---|---|---|
| Chromosome | Location | Sequence (5′-3′) | NO: | Alignment |
| 1 | 110474222 | TACTCACCTCTACATGCTCAGTG | 3726 | X20 |
| 2 | 136311439 | TACAGCACCTCTGCATTGCCAGGG | 4071 | DNA41 |
| 3 | 159697502 | TATTCACCTCTGCATCTCCAGGG | 4072 | X40 |
| 4 | 3846305 | CTCTCACCTCTGCATGACAAGC | 4326 | RNA41 |
| 5 | 174698295 | TACTCACAATGCATGCTAAAGG | 4327 | RNA31 |
| 6 | 31933576 | TACTCACCTCTGCCTTCCTTTGT | 4551 | X60 |
| 7 | 53373361 | TTATCACCCTGCATGTTCAGGG | 4552 | RNA31 |
| 8 | 77161406 | TACTGACCTTTCCATCTCACTG | 4760 | RNA41 |
| 9 | 101247864 | TACTCACTCAGCATGTTCAGAG | 4761 | RNA31 |
| 10 | 4684859 | GAATAACCTCTGATGGTCAAGG | 4945 | RNA41 |
| 11 | 85210644 | TATTCACCTCTGCATGCTCTGAG | 4946 | X30 |
| 12 | 117261587 | TATTCAGCAATGCATGTCAAGG | 5116 | RNA41 |
| 13 | 94452599 | TACTTACCTTACATGTTCAAGG | 5117 | RNA31 |
| 14 | 64054638 | TACTCAACTCTGCTGCTATAGC | 5243 | RNA41 |
| 15 | 95108931 | TACTCAACTCTGCTGCTCTAGG | 4450 | RNA21 |
| 16 | 56094894 | TACTAACCTTGCCAGCTGAGGG | 5360 | RNA41 |
| 17 | 71161191 | TGCTCACCCCACATGCTCATGG | 5361 | RNA31 |
| 18 | 3284286 | TTTTCTACTCTGCATAATCATGG | 5473 | X60 |
| 19 | 45241812 | ACCTCACCTCTGCCTGCTCTGGG | 5474 | X40 |
| 20 | 13122061 | TACTCAACTGCATTCTCAGGG | 5580 | RNA22 |
| 21 | 45735600 | CACTCACACTACATGCTCTTGG | 5581 | RNA41 |
| 22 | 20392740 | TCCACACCTCTCGGCAAGCTGAGGG | 5645 | DNA42 |
| X | 39842774 | TATATACCTCTGCATGTTCAGAG | 5646 | X50 |
| Y | 20738820 | TAGACACATAAGCATGCTCACAG | 5741 | X60 |

[0413] Additional examples of GA461 off-target sites are presented in U.S. Provisional Patent Application No. 63/322,182, filed Mar. 21, 2022. The GA461 off-target sites may include any one of SEQ ID NOS: 3726-5745.

TABLE 11
ABE variant sequences
MA004 mRNA and protein sequences

| Region | Sequence | |
|---|---|---|
| Full | mRNA | Au'GAGCGAGGu'GGAGu'u'CAGCCACGAGu'ACu'GGAu'GCGGCACGCCCu' |
| sequence | | GACCCu'GGCCAAGCGGGCCCGGGACGAGCGGGAGGu'GCCCGu'GGGCGCCG |
| | | u'GCu'GGu'GCu'GAACAACCGGGu'GAu'CGGCGAGGGCu'GGAACCGGGCC |
| | | Au'CGGCCu'GCACGACCCCACCGCCCACGCCGAGAu'CAu'GGCCCu'GCGGC |
| | | AGGGCGGCCu'GGu'GAu'GCAGAACu'ACCGGCu'GAu'CGACGCCACCCu'G |
| | | u'ACGu'GACCu'u'CGAGCCCu'GCGu'GAu'Gu'GCGCCGGCGCCAu'GAu' |
| | | CCACAGCCGGAu'CGGCCGGGu'GGu'Gu'u'CGGCGu'GCGGAACGCCAAGAC |
| | | CGGCGCCGCCGGCAGCCu'GAu'GGACGu'GCu'GCACCACCCCGGCAu'GAAC |
| | | CACCGGGu'GGAGAu'CACCGAGGGCAu'CCu'GGCCGACGAGu'GCGCCGCCC |
| | | u'GCu'Gu'GCCGGu'u'Cu'u'CCGGAu'GCCCCGGCGGGu'Gu'u'CAACGC |
| | | CCAGAAGAAGGCCCAGAGCAGCACCGACAGGAAAu'AAGAGAGAAAAGAAGAGu' |
| | | AAGAAGAAAu'Au'AAGAGCCACCAGCGGCGGCAGCAGCGGCGGCAGCAGCGG |
| | | CAGCGAGACACCCGGCACCAGCGAGAGCGCCACCCCCGAGAGCAGCGGCGGCAG |
| | | CAGCGGCGGCAGCGACAAGAAGu'ACAGCAu'CGGCCu'GGCCAu'CGGCACCA |
| | | ACAGCGu'GGGCu'GGGCCGu'GAu'CACCGACGAGu'ACAAGGu'GCCCAGCA |
| | | AGAAGu'u'CAAGGu'GCu'GGGCAACACCGACCGGCACAGCAu'CAAGAAGAA |
| | | CCu'GAu'CGGCGCCCu'GCu'Gu'u'CGACAGCGGCGAGACAGCCGAGGCCAC |
| | | CCGGCu'GAAGCGGACCGCCCGGCGGCGGu'ACACCCGGCGGAAGAACCGGAu' |
| | | Cu'GCu'ACCu'GCAGGAGAu'Cu'u'CAGCAACGAGAu'GGCCAAGGu'GGAC |
| | | GACAGCu'u'Cu'u'CCACCGGCu'GGAGGAGAGCu'u'CCu'GGu'GGAGGAG |
| | | GACAAGAAGCACGAGCGGCACCCCAu'Cu'u'CGGCAACAu'CGu'GGACGAGG |
| | | u'GGCCu'ACCACGAGAAGu'ACCCCACCAu'Cu'ACCACCu'GCGGAAGAAGC |
| | | u'GGu'GGACAGCACCGACAAGGCCGACCu'GCGGCu'GAu'Cu'ACCu'GGCC |
| | | Cu'GGCCCACAu'GAu'CAAGu'u'CCGGGGCCACu'u'CCu'GAu'CGAGGGC |
| | | GACCu'GAACCCCGACAACAGCGACGu'GGACAAGCu'Gu'u'CAu'CCAGCu' |
| | | GGu'GCAGACCu'ACAACCAGCu'Gu'u'CGAGGAGAACCCCAu'CAACGCCAG |
| | | CGGCGu'GGACGCCAAGGCCAu'CCu'GAGCGCCCGGCu'GAGCAAGAGCCGGC |
| | | GGCu'GGAGAACCu'GAu'CGCCCAGCu'GCCCGGCGAGAAGAAGAACGGCCu' |
| | | Gu'u'CGGCAACCu'GAu'CGCCCu'GAGCCu'GGGCCu'GACCCCCAACu'u' |
| | | CAAGAGCAACu'u'CGACCu'GGCCGAGGACGCCAAGCu'GCAGCu'GAGCAAG |
| | | GACACCu'ACGACGACGACCu'GGACAACCu'GCu'GGCCCAGAu'CGGCGACC |
| | | AGu'ACGCCGACCu'Gu'u'CCu'GGCCGCCAAGAACCu'GAGCGACGCCAu'C |
| | | Cu'GCu'GAGCGACAu'CCu'GCGGGu'GAACACCGAGAu'CACCAAGGCCCCC |
| | | Cu'GAGCGCCAGCAu'GAu'CAAGCGGu'ACGACGAGCACCACCAGGACCU'GA |
| | | CCCu'GCu'GAAGGCCCu'GGu'GCGGCAGCAGCu'GCCCGAGAAGu'ACAAGG |
| | | AGAu'Cu'u'Cu'u'CGACCAGAGCAAGAACGGCu'ACGCCGGCu'ACAu'CGA |
| | | CGGCGGCGCCAGCCAGGAGGAGu'u'Cu'ACAAGu'u'CAu'CAAGCCCAu'CC |
| | | u'GGAGAAGAu'GGACGGCACCGAGGAGCu'GCu'GGu'GAAGCu'GAACCGGG |
| | | AGGACCu'GCu'GCGGAAGCAGCGGACCu'u'CGACAACGGCAGCAu'CCCCCA |
| | | CCAGAu'CCACCu'GGGCGAGCu'GCACGCCAu'CCu'GCGGCGGCAGGAGGAC |
| | | u'u'Cu'ACCCCu'u'CCu'GAAGGACAACCGGGAGAAGAu'CGAGAAGAu'CC |
| | | u'GACCu'u'CCGGAu'CCCCu'ACu'ACGu'GGGCCCCCu'GGCCCGGGGCAA |
| | | CAGCCGGu'u'CGCCu'GGAu'GACCCGCAAGAGCGAGGAGACAAu'CACCCCC |
| | | u'GGAACu'u'CGAGGAGGu'GGu'GGACAAGGGCGCCAGCGCCCAGAGCu'u' |
| | | CAu'CGAGCGGAu'GACCAACu'u'CGACAAGAACCu'GCCCAACGAGAAGGu' |
| | | GCu'GCCCAAGCACAGCCu'GCu'Gu'ACGAGu'ACu'u'CACCGu'Gu'ACAA |
| | | CGAGCu'GACCAAGGu'GAAGu'ACGu'GACCGAGGGCAu'GCGGAAGCCCGCC |
| | | u'u'CCu'GAGCGGCGAGCAGAAGAAGGCCAu'CGu'GGACCu'GCu'Gu'u'C |
| | | AAGACCAACCGGAAGGu'GACCGu'GAAGCAGCu'GAAGGAGGACu'ACu'u'C |
| | | AAGAAGAu'CGAGu'GCu'u'CGACAGCGu'GGAGAu'CAGCGGCGu'GGAGGA |
| | | CCGGu'u'CAACGCCAGCCu'GGGCACCu'ACCACGACCu'GCu'GAAGAu'CA |
| | | u'CAAGGACAAGGACu'u'CCu'GGACAACGAGGAGAACGAGGACAu'CCu'GG |
| | | AGGACAu'CGu'GCu'GACCCu'GACCCu'Gu'u'CGAGGACCGGGAGAu'GAu' |
| | | CGAGGAGCGGCu'GAAGACCu'ACGCCCACCu'Gu'u'CGACGACAAGGu'GA |
| | | u'GAAGCAGCu'GAAGCGGCGGCGGu'ACACCGGCu'GGGGCCGGCu'GAGCCG |
| | | GAAGCu'GAu'CAACGGCAu'CCGGGACAAGCAGAGCGGCAAGACCAu'CCu'G |
| | | GACu'u'CCu'CAAGAGCGACGGCu'u'CGCCAACCGGAACu'u'CAu'GCAGC |
| | | u'GAu'CCACGACGACAGCCu'GACCu'u'CAAGGAGGACAu'CCAGAAGGCCC |
| | | AGGu'GAGCGGCCAGGGCGACAGCCu'GCACGAGCACAu'CGCCAACCu'GGCC |
| | | GGCAGCCCCGCCAu'CAAGAAGGGCAu'CCu'GCAGACCGu'GAAGGu'GGu'G |
| | | GACGAGCu'GGu'GAAGGu'GAu'GGGCCGGCACAAGCCCGAGAACAu'CGu'G |
| | | Au'CGAGAu'GGCCCGGGAGAACCAGACCACCCAGAAGGGCCAGAAGAACAGCC |
| | | GGGAGCGGAu'GAAGCGGAu'CGAGGAGGGCAu'CAAGGAGCu'GGGCAGCCAG |
| | | Au'CCu'GAAGGAGCACCCCGu'GGAGAACACCCAGCu'GCAGAACGAGAAGCu' |
| | | Gu'ACCu'Gu'ACu'ACCu'GCAGAACGGCCGGGACAu'Gu'ACGu'GGACCA |
| | | GGAGCu'GGACAu'CAACCGGCu'GAGCGACu'ACGACGu'GGACCACAu'CGu' |
| | | GCCCCAGAGCu'u'CCu'GAAGGACGACAGCAu'CGACAACAAGGu'GCu'GA |
| | | CCCGGAGCGACAAGAACCGGGGCAAGAGCGACAACGu'GCCCAGCGAGGAGGu' |
| | | GGu'GAAGAAGAu'GAAGAACu'ACu'GGCGGCAGCu'GCu'GAACGCCAAGCu' |
| | | GAu'CACCCAGCGGAAGu'u'CGACAACCu'GACCAAGGCCGAGCGGGGCGGC |
| | | Cu'GAGCGAGCu'GGACAAGGCCGGCu'u'CAu'CAAGCGGCAGCu'GGu'GGA |
| | | GACACGGCAGAu'CACCAAGCACGu'GGCCCAGAu'CCu'GGACAGCCGGAu'G |
| | | AACACCAAGu'ACGACGAGAACGACAAGCu'GAu'CCGGGAGGu'GAAGGu'GA |
| | | u'CACCCu'CAAGAGCAAGCu'GGu'GAGCGACu'u'CCGGAAGGACu'u'CCA |
| | | Gu'u'Cu'ACAAGGu'GCGGGAGAu'CAACAACu'ACCACCACGCCCACGACGC |
| | | Cu'ACCu'GAACGCCGu'GGu'GGGCACCGCCCu'GAu'CAAGAAGu'ACCCCA |
| | | AGCu'GGAGAGCGAGu'u'CGu'Gu'ACGGCGACu'ACAAGGu'Gu'ACGACGu' |
| | | GCGGAAGAu'GAu'CGCCAAGAGCGAGCAGGAGAu'CGGCAAGGCCACCGCCA |
| | | AGu'ACu'u'Cu'u'Cu'ACAGCAACAu'CAu'GAACu'u'Cu'u'CAAGACCG |
| | | AGAu'CACCCu'GGCCAACGGCGAGAu'CCGGAAGCGGCCCCu'GAu'CGAGAC |
| | | AAACGGCGAGACAGGCGAGAu'CGu'Gu'GGGACAAGGGCCGGGACu'u'CGCC |
| | | ACCGu'GCGGAAGGu'GCu'GAGCAu'GCCCCAGGu'GAACAu'CGu'GAAGAA |
| | | GACCGAGGu'GCAGACCGGCGGCu'u'CAGCAAGGAGAGCAu'CCu'GCCCAAG |
| | | CGGAACAGCGACAAGCu'GAu'CGCCCGGAAGAAGGACu'GGGACCCCAAGAAG |
| | | u'ACGGCGGCu'u'CGACAGCCCCACCGu'GGCCu'ACAGCGu'GCu'GGu'GG |
| | | u'GGCCAAGGu'GGAGAAGGGCAAGAGCAAGAAGCu'CAAGAGCGu'GAAGGAG |
| | | Cu'GCu'GGGCAu'CACCAu'CAu'GGAGCGGAGCAGCu'u'CGAGAAGAACCC |
| | | CAu'CGACu'u'CCu'GGAGGCCAAGGGCu'ACAAGGAGGu'GAAGAAGGACCU' |
| | | GAu'CAu'CAAGCu'GCCCAAGu'ACAGCCu'Gu'u'CGAGCu'GGAGAACGG |
| | | CCGGAAGCGGAu'GCu'GGCCAGCGCCGGCGAGCu'GCAGAAGGGCAACGAGCu' |
| | | GGCCCu'GCCCAGCAAGu'ACGu'GAACu'u'CCu'Gu'ACCu'GGCCAGCCA |
| | | Cu'ACGAGAAGCu'GAAGGGCAGCCCCGAGGACAACGAGCAGAAGCAGCu'Gu' |
| | | u'CGu'GGAGCAGCACAAGCACu'ACCu'GGACGAGAu'CAu'CGAGCAGAu'C |
| | | AGCGAGu'u'CAGCAAGCGGGu'GAu'CCu'GGCCGACGCCAACCu'GGACAAG |
| | | Gu'GCu'GAGCGCCu'ACAACAAGCACCGGGACAAGCCCAu'CCGGGAGCAGGC |
| | | CGAGAACAu'CAu'CCACCu'Gu'u'CACCCu'GACCAACCu'GGGCGCCCCCG |
| | | CCGCCu'u'CAAGu'ACu'u'CGACACCACCAu'CGACCGGAAGCGGu'ACACC |
| | | AGCACCAAGGAGGu'GCu'GGACGCCACCCu'GAu'CCACCAGAGCAu'CACCG |
| | | GCCu'Gu'ACGAGACACGGAu'CGACCu'GAGCCAGCu'GGGCGGCGACGAGGG |
| | | CGCCGACAAGCGGACCGCCGACGGCAGCGAGu'u'CGAGAGCCCCAAGAAGAAG |
| | | CGGAAGGu'Gu'GAGCGGCCGCu'u'AAu'u'AAGCu'GCCu'u'Cu'GCGGGG |
| | | Cu'u'GCCu'u'Cu'GGCCAu'GCCCu'u'Cu'u'Cu'Cu'CCCu'u'GCACCu' |
| | | Gu'ACCu'Cu'u'GGu'Cu'u'u'GAAu'AAAGCCu'GAGu'AGGAAGu'Cu' |
| | | AGA (SEQ ID NO: 5746) |
| | protein | MSEVEFSHEYWMRHALTLAKRARDEREVPVGAVLVLNNRVIGEGWNRAIGLHDP |
| | | TAHAEIMALRQGGLVMQNYRLIDATLYVTFEPCVMCAGAMIHSRIGRVVFGVRN |
| | | AKTGAAGSLMDVLHHPGMNHRVEITEGILADECAALLCRFFRMPRRVFNAQKKA |
| | | QSSTDSGGSSGGSSGSETPGTSESATPESSGGSSGGSDKKYSIGLAIGTNSVGW |
| | | AVITDEYKVPSKKFKVLGNTDRHSIKKNLIGALLFDSGETAEATRLKRTARRRY |
| | | TRRKNRICYLQEIFSNEMAKVDDSFFHRLEESFLVEEDKKHERHPIFGNIVDEV |
| | | AYHEKYPTIYHLRKKLVDSTDKADLRLIYLALAHMIKFRGHFLIEGDLNPDNSD |
| | | VDKLFIQLVQTYNQLFEENPINASGVDAKAILSARLSKSRRLENLIAQLPGEKK |
| | | NGLFGNLIALSLGLTPNFKSNFDLAEDAKLQLSKDTYDDDLDNLLAQIGDQYAD |
| | | LFLAAKNLSDAILLSDILRVNTEITKAPLSASMIKRYDEHHQDLTLLKALVRQQ |
| | | LPEKYKEIFFDQSKNGYAGYIDGGASQEEFYKFIKPILEKMDGTEELLVKLNRE |
| | | DLLRKQRTFDNGSIPHQIHLGELHAILRRQEDFYPFLKDNREKIEKILTFRIPY |
| | | YVGPLARGNSRFAWMTRKSEETITPWNFEEVVDKGASAQSFIERMTNFDKNLPN |
| | | EKVLPKHSLLYEYFTVYNELTKVKYVTEGMRKPAFLSGEQKKAIVDLLFKTNRK |
| | | VTVKQLKEDYFKKIECFDSVEISGVEDRFNASLGTYHDLLKIIKDKDFLDNEEN |
| | | EDILEDIVLTLTLFEDREMIEERLKTYAHLFDDKVMKQLKRRRYTGWGRLSRKL |
| | | INGIRDKQSGKTILDFLKSDGFANRNFMQLIHDDSLTFKEDIQKAQVSGQGDSL |
| | | HEHIANLAGSPAIKKGILQTVKVVDELVKVMGRHKPENIVIEMARENOTTQKGQ |
| | | KNSRERMKRIEEGIKELGSQILKEHPVENTQLQNEKLYLYYLQNGRDMYVDQEL |
| | | DINRLSDYDVDHIVPQSFLKDDSIDNKVLTRSDKNRGKSDNVPSEEVVKKMKNY |
| | | WRQLLNAKLITQRKFDNLTKAERGGLSELDKAGFIKRQLVETROITKHVAQILD |
| | | SRMNTKYDENDKLIREVKVITLKSKLVSDFRKDFQFYKVREINNYHHAHDAYLN |
| | | AVVGTALIKKYPKLESEFVYGDYKVYDVRKMIAKSEQEIGKATAKYFFYSNIMN |
| | | FFKTEITLANGEIRKRPLIETNGETGEIVWDKGRDFATVRKVLSMPQVNIVKKT |
| | | EVQTGGFSKESILPKRNSDKLIARKKDWDPKKYGGFDSPTVAYSVLVVAKVEKG |
| | | KSKKLKSVKELLGITIMERSSFEKNPIDFLEAKGYKEVKKDLIIKLPKYSLFEL |
| | | ENGRKRMLASAGELQKGNELALPSKYVNFLYLASHYEKLKGSPEDNEQKOLFVE |
| | | QHKHYLDEIIEQISEFSKRVILADANLDKVLSAYNKHRDKPIREQAENIIHLFT |
| | | LTNLGAPAAFKYFDTTIDRKRYTSTKEVLDATLIHQSITGLYETRIDLSQLGGD |
| | | EGADKRTADGSEFESPKKKRKV (SEQ ID NO: 5747) |
| 5'UTR | mRNA | AGGAAAu'AAGAGAGAAAAGAAGAGu'AAGAAGAAAu'Au'AAGAGCCACC |
| | | (SEQ ID NO: 5748) |
| TadA | mRNA | Au'GAGCGAGGu'GGAGu'u'CAGCCACGAGu'ACu'GGAu'GCGGCACGCCCu' |
| | | GACCCu'GGCCAAGCGGGCCCGGGACGAGCGGGAGGu'GCCCGu'GGGCGCCG |
| | | u'GCu'GGu'GCu'GAACAACCGGGu'GAu'CGGCGAGGGCu'GGAACCGGGCC |
| | | Au'CGGCCu'GCACGACCCCACCGCCCACGCCGAGAu'CAu'GGCCCu'GCGGC |
| | | AGGGCGGCCu'GGu'GAu'GCAGAACu'ACCGGCu'GAu'CGACGCCACCCu'G |
| | | u'ACGu'GACCu'u'CGAGCCCu'GCGu'GAu'Gu'GCGCCGGCGCCAu'GAu' |
| | | CCACAGCCGGAu'CGGCCGGGu'GGu'Gu'u'CGGCGu'GCGGAACGCCAAGAC |
| | | CGGCGCCGCCGGCAGCCu'GAu'GGACGu'GCu'GCACCACCCCGGCAu'GAAC |
| | | CACCGGGu'GGAGAu'CACCGAGGGCAu'CCu'GGCCGACGAGu'GCGCCGCCC |
| | | u'GCu'Gu'GCCGGu'u'Cu'u'CCGGAu'GCCCCGGCGGGu'Gu'u'CAACGC |
| | | CCAGAAGAAGGCCCAGAGCAGCACCGAC (SEQ ID NO: 5749) |
| | protein | MSEVEFSHEYWMRHALTLAKRARDEREVPVGAVLVLNNRVIGEGWNRAIGLHDP |
| | | TAHAEIMALRQGGLVMQNYRLIDATLYVTFEPCVMCAGAMIHSRIGRVVFGVRN |
| | | AKTGAAGSLMDVLHHPGMNHRVEITEGILADECAALLCRFFRMPRRVFNAQKKA |
| | | QSSTD (SEQ ID NO: 5750) |
| Linker | mRNA | AGCGGCGGCAGCAGCGGCGGCAGCAGCGGCAGCGAGACACCCGGCACCAGCGAG |
| between | | AGCGCCACCCCCGAGAGCAGCGGCGGCAGCAGCGGCGGCAGC (SEQ ID NO: |
| TadA | | 5751) |
| and Cas9 | protein | SGGSSGGSSGSETPGTSESATPESSGGSSGGS (SEQ ID NO: 5752) |
| nickase | | |
| Cas9 | mRNA | GACAAGAAGu'ACAGCAu'CGGCCu'GGCCAu'CGGCACCAACAGCGu'GGGCu' |
| nickase | | GGGCCGu'GAu'CACCGACGAGu'ACAAGGu'GCCCAGCAAGAAGu'u'CAAG |
| | | Gu'GCu'GGGCAACACCGACCGGCACAGCAu'CAAGAAGAACCu'GAu'CGGCG |
| | | CCCu'GCu'Gu'u'CGACAGCGGCGAGACAGCCGAGGCCACCCGGCu'GAAGCG |
| | | GACCGCCCGGCGGCGGu'ACACCCGGCGGAAGAACCGGAu'Cu'GCu'ACCu'G |
| | | CAGGAGAu'Cu'u'CAGCAACGAGAu'GGCCAAGGu'GGACGACAGCu'u'Cu' |
| | | u'CCACCGGCu'GGAGGAGAGCu'u'CCu'GGu'GGAGGAGGACAAGAAGCACG |
| | | AGCGGCACCCCAu'Cu'u'CGGCAACAu'CGu'GGACGAGGu'GGCCu'ACCAC |
| | | GAGAAGu'ACCCCACCAu'Cu'ACCACCu'GCGGAAGAAGCu'GGu'GGACAGC |
| | | ACCGACAAGGCCGACCu'GCGGCu'GAu'Cu'ACCu'GGCCCu'GGCCCACAu' |
| | | GAu'CAAGu'u'CCGGGGCCACu'u'CCu'GAu'CGAGGGCGACCu'GAACCCC |
| | | GACAACAGCGACGu'GGACAAGCu'Gu'u'CAu'CCAGCu'GGu'GCAGACCu' |
| | | ACAACCAGCu'Gu'u'CGAGGAGAACCCCAu'CAACGCCAGCGGCGu'GGACGC |
| | | CAAGGCCAu'CCu'GAGCGCCCGGCu'GAGCAAGAGCCGGCGGCu'GGAGAACC |
| | | u'GAu'CGCCCAGCu'GCCCGGCGAGAAGAAGAACGGCCu'Gu'u'CGGCAACC |
| | | u'GAu'CGCCCu'GAGCCu'GGGCCu'GACCCCCAACu'u'CAAGAGCAACu'u' |
| | | CGACCu'GGCCGAGGACGCCAAGCu'GCAGCu'GAGCAAGGACACCu'ACGAC |
| | | GACGACCu'GGACAACCu'GCu'GGCCCAGAu'CGGCGACCAGu'ACGCCGACC |
| | | u'Gu'u'CCu'GGCCGCCAAGAACCu'GAGCGACGCCAu'CCu'GCu'GAGCGA |
| | | CAu'CCu'GCGGGu'GAACACCGAGAu'CACCAAGGCCCCCCu'GAGCGCCAGC |
| | | Au'GAu'CAAGCGGu'ACGACGAGCACCACCAGGACCu'GACCCu'GCu'GAAG |
| | | GCCCu'GGu'GCGGCAGCAGCu'GCCCGAGAAGu'ACAAGGAGAu'Cu'u'Cu' |
| | | u'CGACCAGAGCAAGAACGGCu'ACGCCGGCu'ACAu'CGACGGCGGCGCCAGC |
| | | CAGGAGGAGu'u'Cu'ACAAGu'u'CAu'CAAGCCCAu'CCu'GGAGAAGAu'G |
| | | GACGGCACCGAGGAGCu'GCu'GGu'GAAGCu'GAACCGGGAGGACCu'GCu'G |
| | | CGGAAGCAGCGGACCu'u'CGACAACGGCAGCAu'CCCCCACCAGAu'CCACCu' |
| | | GGGCGAGCu'GCACGCCAu'CCu'GCGGCGGCAGGAGGACu'u'Cu'ACCCCu' |
| | | u'CCu'GAAGGACAACCGGGAGAAGAu'CGAGAAGAu'CCu'GACCu'u'CCG |
| | | GAu'CCCCu'ACu'ACGu'GGGCCCCCu'GGCCCGGGGCAACAGCCGGu'u'CG |
| | | CCu'GGAu'GACCCGCAAGAGCGAGGAGACAAu'CACCCCCu'GGAACu'u'CG |
| | | AGGAGGu'GGu'GGACAAGGGCGCCAGCGCCCAGAGCu'u'CAu'CGAGCGGAu' |
| | | GACCAACu'u'CGACAAGAACCu'GCCCAACGAGAAGGu'GCu'GCCCAAGCA |
| | | CAGCCu'GCu'Gu'ACGAGu'ACu'u'CACCGu'Gu'ACAACGAGCu'GACCAA |
| | | GGu'GAAGu'ACGu'GACCGAGGGCAu'GCGGAAGCCCGCCu'u'CCu'GAGCG |
| | | GCGAGCAGAAGAAGGCCAu'CGu'GGACCu'GCu'Gu'u'CAAGACCAACCGGA |
| | | AGGu'GACCGu'GAAGCAGCu'GAAGGAGGACu'ACu'u'CAAGAAGAu'CGAG |
| | | u'GCu'u'CGACAGCGu'GGAGAu'CAGCGGCGu'GGAGGACCGGu'u'CAACG |
| | | CCAGCCu'GGGCACCu'ACCACGACCu'GCu'GAAGAu'CAu'CAAGGACAAGG |
| | | ACu'u'CCu'GGACAACGAGGAGAACGAGGACAu'CCu'GGAGGACAu'CGu'G' |
| | | Cu'GACCCu'GACCCu'Gu'u'CGAGGACCGGGAGAu'GAu'CGAGGAGCGGCu |
| | | GAAGACCu'ACGCCCACCu'Gu'u'CGACGACAAGGu'GAu'GAAGCAGCu'G |
| | | AAGCGGCGGCGGu'ACACCGGCu'GGGGCCGGCu'GAGCCGGAAGCu'GAu'CA |
| | | ACGGCAu'CCGGGACAAGCAGAGCGGCAAGACCAu'CCu'GGACu'u'CCu'CA |
| | | AGAGCGACGGCu'u'CGCCAACCGGAACu'u'CAu'GCAGCu'GAu'CCACGAC |
| | | GACAGCCu'GACCu'u'CAAGGAGGACAu'CCAGAAGGCCCAGGu'GAGCGGCC |
| | | AGGGCGACAGCCu'GCACGAGCACAu'CGCCAACCu'GGCCGGCAGCCCCGCCA |
| | | u'CAAGAAGGGCAu'CCu'GCAGACCGu'GAAGGu'GGu'GGACGAGCu'GGu' |
| | | GAAGGu'GAu'GGGCCGGCACAAGCCCGAGAACAu'CGu'GAu'CGAGAu'GGC |
| | | CCGGGAGAACCAGACCACCCAGAAGGGCCAGAAGAACAGCCGGGAGCGGAu'GA |
| | | AGCGGAu'CGAGGAGGGCAu'CAAGGAGCu'GGGCAGCCAGAu'CCu'GAAGGA |
| | | GCACCCCGu'GGAGAACACCCAGCu'GCAGAACGAGAAGCu'Gu'ACCu'Gu'A |
| | | Cu'ACCu'GCAGAACGGCCGGGACAu'Gu'ACGu'GGACCAGGAGCu'GGACAu' |
| | | CAACCGGCu'GAGCGACu'ACGACGu'GGACCACAu'CGu'GCCCCAGAGCu' |
| | | u'CCu'GAAGGACGACAGCAu'CGACAACAAGGu'GCu'GACCCGGAGCGACAA |
| | | GAACCGGGGCAAGAGCGACAACGu'GCCCAGCGAGGAGGu'GGu'GAAGAAGAu' |
| | | GAAGAACu'ACu'GGCGGCAGCu'GCu'GAACGCCAAGCu'GAu'CACCCAGC |
| | | GGAAGu'u'CGACAACCu'GACCAAGGCCGAGCGGGGGGCCu'GAGCGAGCu' |
| | | GGACAAGGCCGGCu'u'CAu'CAAGCGGCAGCu'GGu'GGAGACACGGCAGAU' |
| | | CACCAAGCACGu'GGCCCAGAu'CCu'GGACAGCCGGAu'GAACACCAAGu'AC |
| | | GACGAGAACGACAAGCu'GAu'CCGGGAGGu'GAAGGu'GAu'CACCCu'CAAG |
| | | AGCAAGCu'GGu'GAGCGACu'u'CCGGAAGGACu'u'CCAGu'u'Cu'ACAAG |
| | | Gu'GCGGGAGAu'CAACAACu'ACCACCACGCCCACGACGCCu'ACCu'GAACG |
| | | CCGu'GGu'GGGCACCGCCCu'GAu'CAAGAAGu'ACCCCAAGCu'GGAGAGCG |
| | | AGu'u'CGu'Gu'ACGGCGACu'ACAAGGu'Gu'ACGACGu'GCGGAAGAu'GA |
| | | u'CGCCAAGAGCGAGCAGGAGAu'CGGCAAGGCCACCGCCAAGu'ACu'u'Cu' |
| | | u'Cu'ACAGCAACAu'CAu'GAACu'u'Cu'u'CAAGACCGAGAu'CACCCu'G |
| | | GCCAACGGCGAGAu'CCGGAAGCGGCCCCu'GAu'CGAGACAAACGGCGAGACA |
| | | GGCGAGAu'CGu'Gu'GGGACAAGGGCCGGGACu'u'CGCCACCGu'GCGGAAG |
| | | Gu'GCu'GAGCAu'GCCCCAGGu'GAACAu'CGu'GAAGAAGACCGAGGu'GCA |
| | | GACCGGCGGCu'u'CAGCAAGGAGAGCAu'CCu'GCCCAAGCGGAACAGCGACA |
| | | AGCu'GAu'CGCCCGGAAGAAGGACu'GGGACCCCAAGAAGu'ACGGCGGCu'u' |
| | | CGACAGCCCCACCGu'GGCCu'ACAGCGu'GCu'GGu'GGu'GGCCAAGGu'G |
| | | GAGAAGGGCAAGAGCAAGAAGCu'CAAGAGCGu'GAAGGAGCu'GCu'GGGCAu' |
| | | CACCAu'CAu'GGAGCGGAGCAGCu'u'CGAGAAGAACCCCAu'CGACu'u'C |
| | | Cu'GGAGGCCAAGGGCu'ACAAGGAGGu'GAAGAAGGACCu'GAu'CAu'CAAG |
| | | Cu'GCCCAAGu'ACAGCCu'Gu'u'CGAGCu'GGAGAACGGCCGGAAGCGGAu' |
| | | GCu'GGCCAGCGCCGGCGAGCu'GCAGAAGGGCAACGAGCu'GGCCCu'GCCCA |
| | | GCAAGu'ACGu'GAACu'u'CCu'Gu'ACCu'GGCCAGCCACu'ACGAGAAGCu' |
| | | GAAGGGCAGCCCCGAGGACAACGAGCAGAAGCAGCu'Gu'u'CGu'GGAGCAG |
| | | CACAAGCACu'ACCu'GGACGAGAu'CAu'CGAGCAGAu'CAGCGAGu'u'CAG |
| | | CAAGCGGGu'GAu'CCu'GGCCGACGCCAACCu'GGACAAGGu'GCu'GAGCGC |
| | | Cu'ACAACAAGCACCGGGACAAGCCCAu'CCGGGAGCAGGCCGAGAACAu'CAu' |
| | | CCACCu'Gu'u'CACCCu'GACCAACCu'GGGCGCCCCCGCCGCCu'u'CAAG |
| | | u'ACu'u'CGACACCACCAu'CGACCGGAAGCGGu'ACACCAGCACCAAGGAGG |
| | | u'GCu'GGACGCCACCCu'GAu'CCACCAGAGCAu'CACCGGCCu'Gu'ACGAG |
| | | ACACGGAu'CGACCu'GAGCCAGCu'GGGCGGCGAC (SEQ ID NO: 5753) |
| | protein | DKKYSIGLAIGTNSVGWAVITDEYKVPSKKFKVLGNTDRHSIKKNLIGALLFDS |
| | | GETAEATRLKRTARRRYTRRKNRICYLQEIFSNEMAKVDDSFFHRLEESFLVEE |
| | | DKKHERHPIFGNIVDEVAYHEKYPTIYHLRKKLVDSTDKADLRLIYLALAHMIK |
| | | FRGHFLIEGDLNPDNSDVDKLFIQLVQTYNQLFEENPINASGVDAKAILSARLS |
| | | KSRRLENLIAQLPGEKKNGLFGNLIALSLGLTPNFKSNFDLAEDAKLQLSKDTY |
| | | DDDLDNLLAQIGDQYADLFLAAKNLSDAILLSDILRVNTEITKAPLSASMIKRY |
| | | DEHHQDLTLLKALVRQQLPEKYKEIFFDQSKNGYAGYIDGGASQEEFYKFIKPI |
| | | LEKMDGTEELLVKLNREDLLRKQRTFDNGSIPHQIHLGELHAILRRQEDFYPFL |
| | | KDNREKIEKILTFRIPYYVGPLARGNSRFAWMTRKSEETITPWNFEEVVDKGAS |
| | | AQSFIERMTNFDKNLPNEKVLPKHSLLYEYFTVYNELTKVKYVTEGMRKPAFLS |
| | | GEQKKAIVDLLFKTNRKVTVKQLKEDYFKKIECFDSVEISGVEDRFNASLGTYH |
| | | DLLKIIKDKDFLDNEENEDILEDIVLTLTLFEDREMIEERLKTYAHLFDDKVMK |
| | | QLKRRRYTGWGRLSRKLINGIRDKQSGKTILDFLKSDGFANRNFMQLIHDDSLT |
| | | FKEDIQKAQVSGQGDSLHEHIANLAGSPAIKKGILQTVKVVDELVKVMGRHKPE |
| | | NIVIEMARENQTTQKGQKNSRERMKRIEEGIKELGSQILKEHPVENTQLQNEKL |
| | | YLYYLQNGRDMYVDQELDINRLSDYDVDHIVPQSFLKDDSIDNKVLTRSDKNRG |
| | | KSDNVPSEEVVKKMKNYWRQLLNAKLITQRKFDNLTKAERGGLSELDKAGFIKR |
| | | QLVETRQITKHVAQILDSRMNTKYDENDKLIREVKVITLKSKLVSDFRKDFQFY |
| | | KVREINNYHHAHDAYLNAVVGTALIKKYPKLESEFVYGDYKVYDVRKMIAKSEQ |
| | | EIGKATAKYFFYSNIMNFFKTEITLANGEIRKRPLIETNGETGEIVWDKGRDFA |
| | | TVRKVLSMPQVNIVKKTEVQTGGFSKESILPKRNSDKLIARKKDWDPKKYGGFD |
| | | SPTVAYSVLVVAKVEKGKSKKLKSVKELLGITIMERSSFEKNPIDFLEAKGYKE |
| | | VKKDLIIKLPKYSLFELENGRKRMLASAGELQKGNELALPSKYVNFLYLASHYE |
| | | KLKGSPEDNEQKQLFVEQHKHYLDEIIEQISEFSKRVILADANLDKVLSAYNKH |
| | | RDKPIREQAENIIHLFTLTNLGAPAAFKYFDTTIDRKRYTSTKEVLDATLIHQS |
| | | ITGLYETRIDLSQLGGD (SEQ ID NO: 5754) |
| Linker | mRNA | GAGGGCGCCGAC (SEQ ID NO: 5755) |
| between | Protein | EGAD (SEQ ID NO: 5756) |
| Cas9 | | |
| nickase | | |
| and NLS | | |
| Nuclear | mRNA | AAGCGGACCGCCGACGGCAGCGAGu'u'CGAGAGCCCCAAGAAGAAGCGGAAGG |
| locali- | | u'Gu'GA (SEQ ID NO: 5757) |
| zation | Protein | KRTADGSEFESPKKKRKV (SEQ ID NO: 5758) |
| sequence | | |
| (NLS) | | |
| 3′UTR | mRNA | GCGGCCGCu'u'AAu'u'AAGCu'GCCu'u'Cu'GCGGGGCu'u'GCCu'u' |
| | | Cu'GGCCAu'GCCCu'u'Cu'u'Cu'Cu'CCCu'u'GCACCu'Gu'ACCu' |
| | | Cu'u'GGu'Cu'u'u'GAAu'AAAGCCu'GAGu'AGGAAGu'Cu'AGA (SEQ |
| | | ID NO: 5759) |

The mutations at amino acid positions 691 and 1135 of the nCas9 component and their correspondingnucleotide sequences are indicated as bold and underlined.
u': N¹-methylpseudouridine
The first nucleotide in the 5′UTR has a 2′-O-methyl modification.

[0414] Other ABE variants may be employed to effect editing of human TTR gene. Examples of such ABE variants are described International Patent Application PCT/US21/26729, filed on Apr. 9, 2021, entitled BASE EDITING OF PCSK9 AND METHODS OF USING SAME FOR TREATMENT OF DISEASE, and naming Verve Therapeutics, Inc. as the applicant.

### Example 3

### In Vivo Non-Human Primate (NHP) Base Editing of TTR Gene

[0415] In this example, NHP surrogate sgRNAs (GA519 and GA520), corresponding to the human GA457 and GA460 sgRNAs described above, were prepared, and formulated with previously described ABE8.8 mRNA, encapsulated in lipid nanoparticles (LNPs), and intravenously dosed to NHPs. The study involved two distinct aspects.

[0416] The first aspect of the NHP in vivo study involved evaluating LNP1 and LNP2, which differed only in that LNP1 was formulated to encapsulate GA519 and ABE8.8 mRNA whereas LNP2 was formulated to encapsulate GA520 and ABE8.8 mRNA. The second aspect of the study involved formulating and evaluating a third LNP (LNP3). LNP3, like LNP1, was formulated to encapsulate GA519 and ABE8.8 mRNA. However, LNP 3 differed from LNP1 in that LNP3 included a GalNAc moiety constituent. In each aspect of the study, base editing efficiency, TTR protein expression, safety profiles, and pharmacokinetics were evaluated at multiple times post-infusion of the NHPs, as is further detailed below and illustrated in the accompanying figures.

### Part A: In Vivo NHP Evaluation of GA519 and GA520 Using Non-GalNAc LNPs

### LNP Preparation

[0417] In this first aspect of the NHP study, two LNPs (LNP1 and LNP2) were formulated, with LNP1 encapsulating GA519 and ABE8.8 mRNA and LNP2 encapsulate GA520 and ABE8.8 mRNA. The constituents of each of the LNPs are comprised of an ionizable amino lipid (iLipid), a neutral helper lipid, a PEG-Lipid and a sterol lipid as described in and at the ratios indicated in Table 12 below.

TABLE 12
LNP1/LNP2 Components

| LNP | | | Mol |
|---|---|---|---|
| Component | Lipid names | Lipid structure | % |
| Amino lipid (iLipid) | 3-((4,4-bis(octyloxy)butanoyl)oxy)-2-((((3- (diethylamino)propoxy)carbonyl)oxy)methyl) propyl (9Z,12Z)-octadeca-9,12-dienoate* | [chemical structure] | 50 |
| Neutral helper lipid | 1,2-distearoyl-sn-glycero-3- phosphocholine (DSPC) | [chemical structure] | 9 |
| PEG-lipid | 1,2-dimyristoyl-rac-glycero-3- methoxypolyethylene glycol-2000 (PEG₂₀₀₀-DMG) | [chemical structure] | 3 |
| Sterol lipid | Cholesterol | [chemical structure] | 38 |

*described in International Published Patent Application WO 2015/095340 A1

[0418] It should be understood that the lipids in Table 12 may be substituted for other suitable lipids in the listed class. In some embodiments, for example, the LNP comprises the amino lipid VL422 described in the International published patent application WO 2022/060871 A1. For example, the amino lipid may be VL422, or a pharmaceutically acceptable salt or solvate thereof:

[chemical structure]

[0419] It should be further understood that the mol % of lipids in Table 12 may be adjusted and that the mol % included in Table 12 are targeted excipient percentages of the LNP, which is intended to represent the aggregate mol % of all the LNPs formulated in a given batch and that specific LNPs within a batch may have varying mol %. Thus, it is contemplated herein that the mol % of one or more, or all of the LNP components set forth in Table 12 may be adjusted, for example, by +/−1-5%, +/−5-10%, or +/−10%-20%. It is further contemplated herein that the mol % of one or more, or all of the LNP components set forth in Table 12 with respect to a specific LNP formulated in a given batch of LNPs formulated in accordance with desired target excipient percentages, may vary from the targeted mol %, for example, by +/−1-5%, +/−5-10%, or +/−10%-20%, or even greater than +/−20%. Further, it should be understood that additional LNP components, including non-lipid components, may be added to the LNP components set-forth in Table 12. As set forth in Table 13, LNP 1 was formulated with sgRNA GA519 and LNP2 was formulated with GA520, which correspond respectively to the sgRNA GA457 and GA460, previously described. GA519 and GA520 were chemically synthesized and the sequences and chemical modifications of GA519 and GA520 are specified in Table 13.

TABLE 13
GA519 and GA520 TTR Gene Targeted Guides

| | | | | Equivalent | |
|---|---|---|---|---|---|
| | gRNA | | Protospacer | Human | |
| LNP | ID | Species | (5′-3′) | gRNA | gRNA Sequence (5′-3′) |
| 1 | GA519 | Cyno | GCCATCCTGC | GA457 | gscscsAUCCUGCCAAGAACG |
| | | | CAAGAACGAG | | AGgUUUUAGagcuaGaaauag |
| | | | (SEQ ID | | caaGUUaAaAuAaggcuaGUc |
| | | | NO; 28) | | CGUUAucAAcuuGaaaaagug |
| | | | | | Gcaccgagucggugcuususu |
| | | | | | S (SEQ ID NO: 16) |
| 2 | GA520 | Cyno | TATAGGAAAA | GA460 | usasusAGGAAAACCAGUGAG |
| | | | CCAGTGAGTC | | UCgUUUUAGagcuaGaaauag |
| | | | (SEQ ID | | caaGUUaAaAuAaggcuaGUc |
| | | | NO: 26) | | CGUUAucAAcuuGaaaaagug |
| | | | | | Gcaccgagucggugcuususu |
| | | | | | s (SEQ ID NO: 17) |

Letters in the sequences:
A = adenosine; C = cytidine; G = guanosine; U = uridine; a = 2′-O-methyladenosine; c = 2′-O-methylcytidine; g = 2′-O-methylguanosine; u = 2′-O-methyluridine; s = phosphorothioate (PS) backbone linkage.
C = nucleotide that differs in NHP from human TTR sequence.
Bold type in gRNA sequence denotes spacer sequence corresponding to Protospacer.

[0420] Notably as compared to GA457, GA519 hybridizes between positions 50,681,581 to 50,681,603 in exon 1 of the reference cynomolgus monkey genome (macFas5) and edits the adenosine at position 50,681,584 resulting in disruption of the full length TTR protein sequence by converting a methionine to a threonine amino acid and prohibiting protein translation (FIG. 8). GA519 is the cynomolgus surrogate of the human GA457 gRNA and maps to the analogous region of the human TTR locus as in FIG. 4 as previously described. The cynomolgus GA519 gRNA differs from GA457 by a single nucleotide at position 17 of the protospacer and is highlighted with an underline in Protospacer column of Table 13. Furthermore, GA519 and GA457 differ from one another in that the tracr region of GA519 incorporates chemical modifications (detailed in Table 13). The chemical modifications are designed for, or capable of, improving in vivo stability.

[0421] Similarly, as compared to GA460, GA520 hybridizes between positions 50,678,305 to 50,678,327 of exon 3 of the reference cynomolgus monkey genome (macFas5) and edits the adenosine at position 50,678,324 resulting in splicing acceptor disruption producing a truncated non-functional TTR protein (FIG. 9). The protospacer region for GA520 is identical to the human GA460 and maps to the analogous region of the human TTR locus as in FIG. 4 as previously described. GA520 and GA460 differ in the tracr region and incorporate chemical modifications, as detailed in the table above, that are designed for, or capable of, improving in vivo stability.

[0422] For reference, the targeted nucleotide for base editing is highlighted in bold in FIGS. 8 and 9. FIGS. 8 and 9 also identify the location of the spacer of GA519 and GA520 relative to the TTR gene as previously described.

[0423] LNP 1 and LNP2 were formulated using ABE 8.8 mRNA and GA519 and GA520, respectively, with an sgRNA:mRNA weight ratio of 1:1. In other words, the LNPs were formulated with an equal amount by weight of guide RNA as mRNA. The resulting LNPs encapsulating the sgRNAs and ABE 8.8 mRNA were filtered using 0.2-micron filters and frozen at −80° C. Physical characteristics of the formulated LNPs are summarized in Table 14.

TABLE 14
LNP1/LNP2 Characterization

| | | | RNA entrapment |
|---|---|---|---|
| LNP | Average LNP size (nm) | PDI | (%) |
| 1 | 68.6 | 0.022 | 95.7 |
| 2 | 68.6 | 0.029 | 96.2 |

PDI is Polydispersity Index

One of ordinary skill in the art would understand that the average LNP size, PDI and RNA entrapment values set forth in Table 14 are subject to measurement error or accuracy. It is also contemplated herein that the LNP size, PDI and RNA entrapment values set forth in Table 14 may be varied by +/−1-5%, +/−5-10%, or +/−10%-20%.

### NHP Study Design

[0424] In this aspect of the study, female cynomolgus monkeys of Cambodian origin were used as study animals. A premedication regimen comprising dexamethasone and H1 and H2 antihistamines was administered to all animals on day −1 (approximately 24 hours prior to dosing) and day 1 (predose), at 30 to 60 minutes prior to test article dose administration. Three monkeys were dosed with LNP1 and 3 monkey were dosed with LNP 2 on day 1 of the study via a single IV infusion at a dose level of 3 mg of combined sgRNA and mRNA per kg of animal body weight and at a dose volume of 6 mL/kg (n=3/group).

[0425] Blood samples were collected from all animals predose for baseline measurement and post-dose at various time points on days 1 through 15 to assess biomarkers, cytokines, plasma iLipid and PEG-Lipid pharmacokinetics, and serum safety parameters.

[0426] Necropsies were performed on all animals at day 16. Liver biopsy samples were collected to assess TTR gene editing.

### Analysis of Editing Efficiency

[0427] The amount of gene editing in the liver was evaluated by next-generation sequencing (NGS) of targeted polymerase chain reaction (PCR) amplicons at the TTR target site derived from genomic DNA extracted from the liver of the animal using the method described previously (Musunuru et al, Nature 593, no. 7859 (May 2021): 429-34. https://doi.org/10.1038/s41586-021-03534-y). Percent editing was reported as the percent of all reads containing a nonreference allele at the target adenine.

[0428] FIG. 10 illustrates TTR editing efficiency of LNP1 as compared to LNP2. Notably, as illustrated in FIG. 10, the average hepatic TTR editing efficiency is higher in NHP treated with LNP1 (52%) compared to LNP2 (29%).

### Quantification of TTR Protein Expression in Serum

[0429] Serum was collected from all animals on days −10, −7, −5 pre-infusion and days 7, and 14 post LNP infusion for TTR protein analysis. Serum TTR was quantified using two methods. TTR protein levels were initially quantified using a custom TTR sandwich ELISA with the data obtained from that analysis presented in FIG. 11. Values for day −10, −7, and −5 were averaged to obtain the baseline value. Notably, LNP1 treated animals showed greater liver TTR editing, also showed greater plasma TTR reductions (−63% change from baseline on Day 14) when compared to LNP2 treated animals (3% change from baseline on Day 14). TTR protein collected from serum were also quantitated using liquid chromatography mass-spectrometry (LC-MS), in which four unique serum TTR peptide fragments were quantitated from each sample time point and the average of the results is reported. LC-MS serum TTR quantitation analysis using LC-MS is set forth in FIG. 12 and was notably consistent with the data obtained from the ELISA quantification in that it also demonstrated that LNP1 showed greater plasma TTR reductions (−73% change from baseline on day 14) when compared to LNP2 (−21% change from baseline on day 14).

[0430] Thus, as illustrated in FIGS. 10, 11 and 12, infusion of LNP1 and LNP2 in NHPs resulted in editing of the TTR gene in the liver, with LNP1 demonstrating greater editing than LNP2. The greater editing of LNP1 NHPs corresponded to a commensurate increase in the reduction in serum TTR concentrations in serum.

### Safety Analysis

[0431] Blood serum was collected from all animals at day −10, −7, −5 pre-infusion and 6, 24, 48, 96, 168, 240, and 336 hours post LNP infusion for safety analysis and specifically directed to observing changes in liver enzymes and cytokine levels. Serum chemistry parameters were directly measured from blood serum samples on a Beckman Coulter AU680 analyzer. Values for day −10, −7, and −5 were averaged to obtain the baseline value. Both LNP1 and LNP2 dosed animals showed transient alanine aminotransferase (FIG. 13A) elevations that peaked at 48 hours post end of infusion and returned to baseline levels 168 hours post end of infusion. Aspartate aminotransferase levels, illustrated in FIG. 13B, were also elevated by both LNP1 and LNP2 treatments, peaking at 6 hours post end of infusion and returning to baseline levels 96 hours post end of infusion. Serum lactate dehydrogenase concentrations, as illustrated in FIG. 14A, and glutamate dehydrogenase concentrations, as illustrated in FIG. 14B, were also found to be elevated shortly following administration of either LNP1 or LNP2 that returned to baseline levels 96-168 hours post end of infusion. Serum concentrations of gamma-glutamyl transferase, illustrated in FIG. 15A, and alkaline phosphatase, FIG. 15B, were not changed by either LNP1 or LNP2 infusion. In addition, LNP1 and LNP2 treatment did not affect serum total bilirubin concentrations, as illustrated in FIG. 16. LNP1 and LNP2 dosed animals, each also showed elevated serum creatine kinase concentrations, as illustrated in FIG. 17, which in each case peaked at 6 hours and returned fully to baseline levels by 168 hours post end of infusion.

[0432] Serum was collected from all animals at day −10, −7, −5 pre-treatment and 24, 168, and 336 hours post LNP infusion for serum cytokine analysis. Cytokines were measured using a multiplexed sandwich immunoassay, where four (MCP-1, IL-6, IP-10, IL-1RA) cytokines are quantitated simultaneously from serum samples using the U-PLEX Biomarker Group 1 (monkey) Assay from Meso Scale Diagnostics (Rockville, MD). Values for day −10, −7, and −5 were averaged to obtain the baseline value. Both LNP1 and LNP2 dosed animals showed elevated serum IL-6 concentrations, as illustrated in FIG. 18, to a similar extent, peaking at 6 hours and returning to baseline by 24 hours post end of infusion. As further illustrated in FIG. 18, both LNP1 and LNP2 dosed animals showed increased serum IL-1RA that peaked at 6 hours and returned fully to baseline by 336 hours. Also, as illustrated in FIG. 18, neither LNP1 nor LNP2 had any measurable significant effect on serum MCP-1 or IP-10 concentrations.

[0433] Overall, the analysis of foregoing parameters showed that infusion of either LNP1 and LNP2 in monkeys produced a transient increase in liver enzymes and cytokines that resolves rapidly.

### Pharmacokinetics (PK) Evaluation

[0434] Blood samples were obtained (K₂EDTA) for plasma PK analysis and determination of concentrations of the iLipid and PEGLipid excipients that comprised LNP1 and LNP2. After the end of the infusion, plasma samples were collected at 0.25, 2, 6, 24, 48, 96, 168, 240, and 336 hours post LNP infusion. Concentrations of the iLipid and PEG Lipids were measured using qualified LC-MS assays and are shown in FIG. 19A. Timepoints in which the lipids were below the limit of quantitation are not included in the figure. As illustrated in FIG. 19A, serum iLipid concentrations for LNP1 and LNP2 dosed animals continuously declined until approaching lower limit of quantitation (LLOQ) at 96 hour post LNP infusion. Similarly, as illustrated in FIG. 19B, serum PEG-Lipid concentrations for LNP1 and LNP2 dosed animals also rapidly declined reaching an LLOQ at 24 hours post end of infusion.

Part B: In Vivo NHP Evaluation of GA519 with GalNAc LNP

[0435] In further evaluation of GA519, an additional LNP (LNP3) was formulated to encapsulate the same GA519 and ABE8.8 mRNA at the 1:1 weight ratio and dosed intravenously to NHPs as previously described. LNP3 differs from LNP1 in that LNP3 was formulated with an additional GalNAc ligand excipient, as described in more detail below.

### LNP Preparation

[0436] The GalNAc LNPs (LNP3) formulated for this aspect of the study were comprised of the same iLipid, neutral helper lipid, PEG-Lipid and sterol lipid as described in connection with LNP1/LNP2, but unlike LNP1/LNP2, LNP3 also is comprised of a GalNAc conjugated lipid. The molar ratios of each constituent component of LNP3 are described in Table 15.

TABLE 15
LNP3 Components

| LNP | | | Mol |
|---|---|---|---|
| Component | Lipid names | Lipid structure | % |
| Amino lipid (iLipid) | 3-((4,4-bis(octyloxy)butanoyl)oxy)- 2-((((3- (diethylamino)propoxy)carbonyl) oxy)methyl)propyl (9Z,12Z)- octadeca-9,12-dienoate* | [chemical structure] | 50 |
| Neutral helper lipid | 1,2-distearoyl-sn-glycero-3- phosphocholine (DSPC) | [chemical structure] | 9 |
| PEG-lipid | 1,2-dimyristoyl-rac-glycero-3- methoxypolyethylene glycol-2000 (PEG₂₀₀₀-DMG) | [chemical structure] | 3 |
| Sterol lipid | Cholesterol | [chemical structure] | 37.95 |
| GalNAc- lipid | N²-(PEG-DSG)-N⁶-((C5- GalNAc)amido)-Lys-[bis((C5- GalNAc)propylamido)]amide or DSG-PEG-Lys-tris(GalNAc)** | [chemical structure] | 0.05 |

*described in International Published Patent Application WO 2015 095340 A1
**described in International Published Patent Application WO 2021/178725 A1

[0437] It should be understood that the lipids in Table 15 may be substituted for other suitable lipids in the listed class. For example, the amino lipid may be the following amino lipid, or a salt thereof:

[chemical structure]

[0438] It should be further understood that the mol % of lipids in Table 13 may be adjusted and that the mol % included in Table 13 are targeted excipient percentages of the LNP, which is intended to represent the aggregate mol % of all the LNPs formulated in a given batch and that specific LNPs within a batch may have varying mol %. Thus, it is contemplated herein that the mol % of one or more, or all of the LNP components set forth in Table 13 may be adjusted, for example, by +/−1-5%, +/−5-10%, or +/−10%-20%. It is further contemplated herein that the mol % of one or more, or all of the LNP components set forth in Table 13 with respect to a specific LNP formulated in a given batch of LNPs formulated in accordance with desired target excipient percentages, may vary from the targeted mol %, for example, by +/−1-5%, +/−5-10%, or +/−10%-20%, or even greater than +/−20%. Further, it should be understood that additional LNP components, including non-lipid components, may be added to the LNP components set-forth in Table 13.

[0439] In formulating LNP3, the GalNAc-Lipid was premixed with other LNP excipients referenced in Table 15 prior to in-line mixing with GA519 sgRNA and ABE 8.8 mRNA (at 1:1 weight ratio) to form LNP3. Rajeev et al., WO2021178725, includes a description of the synthesis and characterization of the GalNAc lipid. As with LNP1/LNP2, the resulting GalNAc-LNPs, LNP3, were filtered using 0.2-micron filters and frozen at −80° C. The physical characteristics of the formulated LNP3 is summarized in Table 16.

TABLE 16
LNP3 Characterization.

| LNP | Average LNP size (nm) | PDI | RNA entrapment |
|---|---|---|---|
| 3 | 61.92 | 0.055 | 98.7 |

[0440] One of ordinary skill in the art would understand that the average LNP size, PDI and RNA entrapment values set forth in Table 16 are subject to measurement error or accuracy. It is also contemplated herein that the LNP size, PDI and RNA entrapment values set forth in Table 16 may be varied by +/−1-5%, +/−5-10%, or +/−10%-20%.

### NHP Study Design

[0441] Male cynomolgus monkeys of Cambodian origin were used in this aspect of the study. A premedication regimen comprising dexamethasone and H1 and H2 antihistamines were administered to all animals on day −1 (approximately 24 hours prior to dosing) and day 1 (predose), between 30 and 60 minutes before test article dose administration. The LNP3 dosing formulations were administered once on day 1 of the study by IV infusion of two groups of 3 monkeys at dose levels of (i) 2 mg of combined sgRNA and mRNA per kg of animal body weight and at a dose volume of 6 mL/kg (n=3/group) for the first group of three monkeys and (ii) 3 mg of combined sgRNA and mRNA per kg of animal body weight and at a dose volume of 6 mL/kg (n=3/group) for the second group of three monkeys.

[0442] Blood samples were collected from all animals predose for baseline measurement and post infusion at various time points from days 1 through 35 to assess biomarkers, plasma iLipid and PEG pharmacokinetics, and serum safety parameters.

[0443] Necropsies were performed on day 36. Liver tissue samples were collected from all animals to assess TTR gene editing in the liver.

### Analysis of Editing Efficiency

[0444] The amount of gene editing in the liver was evaluated by next-generation sequencing (NGS) of targeted polymerase chain reaction (PCR) amplicons at the TTR target site derived from genomic DNA extracted from the liver as described previously (Musunuru et al., Nature 593, no. 7859 (May 2021): 429-34. https://doi.org/10.1038/s41586-021-03534-y). Percent editing was reported as the percent of all reads containing a nonreference allele at the target adenine.

[0445] As set forth in FIG. 20, LNP3 led to similar levels of hepatic TTR editing efficiency at 2 mg/kg dosed monkeys (60%) as compared to 3 mg/kg dosed monkeys (63%).

### Quantification of TTR Protein Expression in Serum

[0446] Serum was collected at day −10, −7, −5 pre-infusion and 7, 14, 21, 28, and 35 days post end of infusion for TTR protein analysis. Serum TTR was initially quantified using a custom TTR sandwich ELISA with the data obtained from that analysis presented in FIG. 21. Values for day −10, −7, and −5 were averaged to obtain the baseline value. As illustrated in FIG. 21, both groups of LNP3 dosed animals showed marked reductions in serum TTR protein at the first timepoint (day 7) after dosing. These reductions were maintained for the duration of the study, reaching maximal reductions on day 28 of −84% and −91% change from baseline for the 2 mg/kg and 3 mg/kg monkey groups, respectively. To confirm the ELISA results, TTR protein was also quantitated by LC-MS, in which 4 unique TTR peptide fragments were quantitated in serum at each time point and the average of the 4 results is reported. LC-MS serum TTR quantitation, as illustrated in FIG. 22, confirmed that TTR was reduced at the first timepoint after infusion of the animals on day 7 and was maintained until necropsy on day 35. For the 2 mg/kg LNP3 dosed animals, maximal reduction of TTR protein was reached on day 35 (−82% change from baseline), while for the 3 mg/kg group maximal of TTR protein was reached on day 28 (−87% change from baseline).

[0447] Therefore, as described above and illustrated in the foregoing referenced figures, both the 2 mg/kg and 3 mg/kg LNP3 dosed NHPs resulted in marked relatively rapid liver TTR gene editing and corresponding reductions in serum TTR concentrations in protein.

### Safety Analysis

[0448] Blood serum was collected from each of the animals in the study at day −10, −7, −5 pre-infusion and 6, 24, 48, 96, 168, 336 hours, day 21, day 28, and day 35 post end of infusion for safety analysis and specifically directed at observing changes in liver enzymes and cytokine levels. Serum chemistry parameters were directly measured from blood serum samples on a Beckman Coulter AU680 analyzer. Values for day −10, −7, and −5 were averaged to obtain the baseline value. LNP3 dosed animals showed dose-dependent, transient alanine aminotransferase elevations as illustrated in FIG. 23A, which peaked at 24-48 hours post end of infusion and returned to baseline levels 336 hours post end of infusion. Aspartate aminotransferase levels, as illustrated in FIG. 23B, were elevated to a similar extent by both the 2 mg/kg and 3 mg/kg LNP3 doses, peaking at 6 hours post end of infusion and returning to baseline levels 168 hours post end of infusion. As illustrated in FIG. 24A, both the 2 mg/k and 3 mg/kg LNP3 doses elevated serum lactate dehydrogenase concentrations that returned to baseline levels by 168 hours post end of infusion. LNP3 also elevated glutamate dehydrogenase concentrations, as illustrated in FIG. 24B, in a dose-dependent manner, peaking at 24-hours, and returning to baseline levels 336 hours post end of infusion. Serum concentrations of gamma-glutamyl transferase and alkaline phosphatase, illustrated in FIGS. 25A and 25B, respectively, were not significantly changed by either LNP dose. In addition, LNP3 treatment did not significantly affect serum total bilirubin concentrations, as illustrated in FIG. 26. LNP3 elevated serum creatine kinase concentrations, as illustrated in FIG. 27, peaking at 6 hours post end of infusion then returning to baseline levels by 168 hours post end of infusion.

[0449] The analysis of the foregoing safety parameters in this aspect of the in vivo NHP study were consistent the prior aspect of the study in that they demonstrated that both doses of LNP3 produced a transient increase in liver enzymes that resolved rapidly within 2 weeks following dosing of the subjects.

### Pharmacokinetics (PK) Evaluation

[0450] Blood samples were obtained from all animals (K₂EDTA) for plasma PK analysis and determination of concentrations of the ionizable amino lipid (iLipid) and PEGLipid that comprised LNP3. After the end of the infusion, plasma samples were collected at 0.25, 2, 6, 24, 48, 96, 168, 240, and 336 hours post LNP3 infusion. Concentrations of iLipid and PEG-Lipid were measured using qualified LC-MS assays. Dose-dependent iLipid plasma exposure was observed, as illustrated in FIG. 28A, declining below the LLOQ by 96 hours post end of infusion. Dose dependent plasma exposure of PEG lipid was also observed, as illustrated in FIG. 28B, reaching the LLOQ by 24 hours post end of infusion.

[0451] The complete disclosure of all patents, patent applications, and publications, and electronically available material (including, for instance, nucleotide sequence submissions in, e.g., GenBank and RefSeq, and amino acid sequence submissions in, e.g., SwissProt, PIR, PRF, PDB, and translations from annotated coding regions in GenBank and RefSeq) cited herein are incorporated by reference. In the event that any inconsistency exists between the disclosure of the present application and the disclosure(s) of any document incorporated herein by reference, the disclosure of the present application shall govern. The foregoing detailed description and examples have been given for clarity of understanding only. No unnecessary limitations are to be understood therefrom. The invention is not limited to the exact details shown and described, for variations obvious to one skilled in the art will be included within the invention defined by the claims.

### Example 4

### TTR Gene Editing by GA521 Guide RNA

[0452] This example illustrates gene editing by an exemplary modified guide RNA, GA521.

[0453] Exemplary guide RNA GA521 was transfected into primary human hepatocytes using MessengerMax transfection. GA521 disrupts the start codon AUG of the TTR gene by editing it to ACG with an A-to-G base editor (e.g., ABE8.8; ABE8.8-m).

[0454] Three days after transfection, genomic DNA was harvested from the hepatocytes, and assessed for base editing with next-generation sequencing of PCR amplicons generated around the target splice site.

[0455] The human TTR locus primers used for NGS analysis are listed below:

[0456] With NGS adapters:

Forward (F):
SEQ ID NO: 5769)
TCGTCGGCAGCGTCAGATGTGTATAAGAGACAGGATAAGCAGCCTAGCTC
AGGAGA
Reverse (R):
(SEQ ID NO: 5770)
GTCTCGTGGGCTCGGAGATGTGTATAAGAGACAGGGGCCAGCCTCAGACA
CAAA

[0457] Without NGS adapters:

```
  (SEQ ID NO: 5771))
Forward (F): GATAAGCAGCCTAGCTCAGGAGA
  (SEQ ID NO: 5772))
Reverse (R): GGGCCAGCCTCAGACACAAA
```

[0458] FIG. 29 depicts dose response for human gRNA GA521 in primary human hepatocytes. Percent base editing at various doses (ng/ml) total RNA was determined from NGS analysis. GA521 was the guide RNA.

[0459] Overall, GA521 showed an increase in base editing with increasing dose (ng/ml) total RNA and high and sustained editing activity of greater than 40% in human cells.

### OTHER EMBODIMENTS

[0460] From the foregoing description, it will be apparent that variations and modifications may be made to the disclosure described herein to adopt it to various usages and conditions. Such embodiments are also within the scope of the following claims.

[0461] The recitation of a listing of elements in any definition of a variable herein includes definitions of that variable as any single element or combination (or subcombination) of listed elements. The recitation of an embodiment herein includes that embodiment as any single embodiment, any portion of the embodiment, or in combination with any other embodiments or any portion thereof.

[0462] As is set forth herein, it will be appreciated that the disclosure comprises specific embodiments and examples of base editing systems to effect a nucleobase alteration in a gene and methods of using same for treatment of disease including compositions that comprise such base editing systems, designs and modifications thereto; and specific examples and embodiments describing the synthesis, manufacture, use, and efficacy of the foregoing individually and in combination including as pharmaceutical compositions for treating disease and for in vivo and in vitro delivery of active agents to mammalian cells under described conditions.

[0463] While specific examples and numerous embodiments have been provided to illustrate aspects and combinations of aspects of the foregoing, it should be appreciated and understood that any aspect, or combination thereof, of an exemplary or disclosed embodiment may be excluded therefrom to constitute another embodiment without limitation and that it is contemplated that any such embodiment can constitute a separate and independent claim. Similarly, it should be appreciated and understood that any aspect or combination of aspects of one or more embodiments may also be included or combined with any aspect or combination of aspects of one or more embodiments and that it is contemplated herein that all such combinations thereof fall within the scope of this disclosure and can be presented as separate and independent claims without limitation. Accordingly, it should be appreciated that any feature presented in one claim may be included in another claim; any feature presented in one claim may be removed from the claim to constitute a claim without that feature; and any feature presented in one claim may be combined with any feature in another claim, each of which is contemplated herein.

TABLE 17
gRNA spacer sequence with PS linkage at 5′ end
gRNA spacer sequence (5′-3′)

gscscsAUCCUGCCAAGAAUGAG (SEQ ID NO: 6)
gscscsAUCCUGCCAAGAACGAG (SEQ ID NO: 7)
gscsasACUUACCCAGAGGCAAA (SEQ ID NO: 8)
usasusAGGAAAACCAGUGAGUC (SEQ ID NO: 9)
usascsUCACCUCUGCAUGCUCA (SEQ ID NO: 10)
gscscsAUCCUGCCAAGAACGAG (SEQ ID NO: 7)
wherein:
A is adenosine; C is cytidine; G is guanosine; U is uridine; a is 2′-O-methyladenosine; c is 2′-O-methylcytidine; g is 2′-O-methylguanosine; u is 2′-O-methyluridine and s is phosphorothioate (PS) backbone linkage.

TABLE 18
gRNA spacer sequence without PS linkage
gRNA spacer sequence (5′-3′)

GCCAUCCUGCCAAGAAUGAG (SEQ ID NO: 1)
GCCAUCCUGCCAAGAACGAG (SEQ ID NO: 2)
GCAACUUACCCAGAGGCAAA (SEQ ID NO: 3)
UAUAGGAAAACCAGUGAGUC (SEQ ID NO: 4)
UACUCACCUCUGCAUGCUCA (SEQ ID NO: 5)
GCCAUCCUGCCAAGAACGAG (SEQ ID NO: 2)
wherein A is a modified or unmodified adenosine; C is a modified or unmodified cytidine; G is modified or unmodified guanosine; and U is a modified or unmodified uridine.

TABLE 19
Guide RNA sequence
Guide RNA sequence (5′-3′)

gscscsAUCCUGCCAAGAAUGAGGUUUUAGAGCUAGAAAUAGCAAGUUAAAAUAAGGCUAGUC
CGUUAUCAACUUGAAAAAGUGGCACCGAGUCGGUGCUsususu (SEQ ID NO: 11)
AUCCUGCCAAGAACGAGGUUUUAGAGCUAGAAAUAGCAAGUUAAAAUAAGGCUAGUCCGUUAU
CAACUUGAAAAAGUGGCACCGAGUCGGUGCUsususu (SEQ ID NO: 12)
gscsasACUUACCCAGAGGCAAAGUUUUAGAGCUAGAAAUAGCAAGUUAAAAUAAGGCUAGUC
CGUUAUCAACUUGAAAAAGUGGCACCGAGUCGGUGCUsususu (SEQ ID NO: 13)
usasusAGGAAAACCAGUGAGUCGUUUUAGAGCUAGAAAUAGCAAGUUAAAAUAAGGCUAGUC
CGUUAUCAACUUGAAAAAGUGGCACCGAGUCGGUGCUsususu (SEQ ID NO: 14)
usascsUCACCUCUGCAUGCUCAGUUUUAGAGCUAGAAAUAGCAAGUUAAAAUAAGGCUAGUC
CGUUAUCAACUUGAAAAAGUGGCACCGAGUCGGUGCUsususu (SEQ ID NO: 15)
gscscsAUCCUGCCAAGAACGAGgUUUUAGagcuaGaaauagcaaGUUaAaAuAaggcuaGUc
GUUAucAAcuuGaaaaagugGcaccgagucggugcuususus (SEQ ID NO: 16)
usasusAGGAAAACCAGUGAGUCgUUUUAGagcuaGaaauagcaaGUUaAaAuAaggcuaGUc
CGUUAucAAcuuGaaaaagugGcaccgagucggugcuususus (SEQ ID NO: 17)
wherein A is adenosine; C is cytidine; G is guanosine; U is uridine; a is 2′-O-methyladenosine; c is 2′-O-methylcytidine; g is 2′-O-methylguanosine; u is 2′-O-methyluridine and s isphosphorothioate (PS) backbone linkage and wherein bold type represents the spacer sequence.

TABLE 20
Guide RNA sequence
gRNA sequence (5′-3′)

GCCAUCCUGCCAAGAAUGAGGUUUUAGAGCUAGAAAUAGCAAGUUAAAAUAAGGCUAGUCCGU
UAUCAACUUGAAAAAGUGGCACCGAGUCGGUGCUUUU (SEQ ID NO: 18)
GCCAUCCUGCCAAGAACGAGGUUUUAGAGCUAGAAAUAGCAAGUUAAAAUAAGGCUAGUCCGU
UAUCAACUUGAAAAAGUGGCACCGAGUCGGUGCUUUU (SEQ ID NO: 19)
GCAACUUACCCAGAGGCAAAGUUUUAGAGCUAGAAAUAGCAAGUUAAAAUAAGGCUAGUCCGU
UAUCAACUUGAAAAAGUGGCACCGAGUCGGUGCUUUU (SEQ ID NO: 20)
UAUAGGAAAACCAGUGAGUCGUUUUAGAGCUAGAAAUAGCAAGUUAAAAUAAGGCUAGUCCGU
UAUCAACUUGAAAAAGUGGCACCGAGUCGGUGCUUUU (SEQ ID NO: 21)
UACUCACCUCUGCAUGCUCAGUUUUAGAGCUAGAAAUAGCAAGUUAAAAUAAGGCUAGUCCGU
UAUCAACUUGAAAAAGUGGCACCGAGUCGGUGCUUUU (SEQ ID NO: 22)
GCCAUCCUGCCAAGAACGAGGUUUUAGAGCUAGAAAUAGCAAGUUAAAAUAAGGCUAGUCCGU
UAUCAACUUGAAAAAGUGGCACCGAGUCGGUGCUUUU (SEQ ID NO: 19)

[0464] It will also be appreciated from reviewing the present disclosure, that it is contemplated that the one or more aspects or features presented in one of or a group of related clauses may also be included in other clauses or in combination with the one or more aspects or features in other clauses.

What is claimed is:

1. A base editor system for modifying a target Transthyretin (TTR) gene, comprising a guide RNA, comprising a sequence defined by
(GA521, SEQ ID NO: 11)
mG*mC*mC*AUCCUGCCAAGAAUGAGmGUUUUAGmAmGmCmUmAGmA
mAmAmUmAmGmCmAmAGUUmAAmAAmUAmAmGmGmCmUmAGUmC
mCGUUAmUmCAAmCmUmUGmAmAmAmAmAmGmUmGGmCmAmCmC
mGmAmGmUmCmGmGmUmGmCmU*mU*mU*mU,
wherein A is adenosine, C is cytidine, G is guanosine, U is uridine, mA* is 2′-O-methyladenosine, mC* is 2′-O-methylcytidine, mG* is 2′-O-methylguanosine, mU* is 2′-O-methyluridine, and wherein nucleotides represented in bold are linked by a phosphorothioate (PS) backbone linkage,
the guide RNA directing the base editor system to effect a nucleobase alteration in the TTR gene.

2. An engineered, non-naturally occurring base editing system for modifying a target Transthyretin (TTR) gene, comprising (a) a guide RNA molecule having a sequence defined by
(SEQ ID NO: 11)
mG*mC*mC*AUCCUGCCAAGAAUGAGmGUUUUAGmAmGmCmUmAGmA
mAmAmUmAmGmCmAmAGUUmAAmAAmUAmAmGmGmCmUmAGUmC
mCGUUAmUmCAAmCmUmUGmAmAmAmAmAmGmUmGGmCmAmCmC
mGmAmGmUmCmGmGmUmGmCmU*mU*mU*mU,
and (b) a codon-optimized nucleic acid encoding a Cas9 protein fused to a deaminase, wherein the Cas9 protein fusion is capable of binding to the guide RNA and of editing the target TTR sequence complementary to the guide RNA.

3. The composition of claim 2, wherein the deaminase comprises a cytosine deaminase or an adenine deaminase.

4. The composition of claim 2, wherein the Cas9 protein is a catalytically impaired Cas9 protein.

5. The composition of claim 4, wherein the Cas9 protein is a dead Cas9 or nickase Cas9.

6. The composition of claim 3, wherein the cytosine or adenine deaminase is a deoxycytosine or a deoxyadenosine deaminase.

7. The composition of claim 3, wherein the Cas9 is fused to ABE8.8.

8. A lipid nanoparticle (LNP) comprising the system of claim 2.

9. The LNP of claim 8, wherein the LNP comprises an ionizable amino lipid, a neutral helper lipid, a PEG-Lipid, a sterol lipid and/or a GalNAc lipid.

10. The LNP of claim 9, wherein the ionizable amino lipid is VL422 or LP-01, the neutral helper lipid is DSPC, the PEG lipid is PEG₂₀₀₀-DMG, the sterol lipid is cholesterol and the GalNAc lipid is DSG-PEG-Lys-tris (GalNAc).

11. The LNP of claim 10, wherein the ionizable lipid is LP-01 (or CIN16645) defined by the structure,

[chemical structure]

12. The LNP of claim 1, wherein the LNP comprises an N:P ratio of between about 1:40 to about 1:1.

13. The LNP of claim 12, wherein the LNP comprises an N:P ratio of about 1:6.

14. A pharmaceutical composition comprising the LNP of claim 1.

15. A method of editing a TTR gene in a cell, the method comprising contacting the cell with an LNP comprising (a) a guide RNA molecule having a sequence defined by
(SEQ ID NO: 11)
mG*mC*mC*AUCCUGCCAAGAAUGAGmGUUUUAGmAmGmCmUmAGmA
mAmAmUmAmGmCmAmAGUUmAAmAAmUAmAmGmGmCmUmAGUmC
mCGUUAmUmCAAmCmUmUGmAmAmAmAmAmGmUmGGmCmAmCmC
mGmAmGmUmCmGmGmUmGmCmU*mU*mU*mU,
and (b) a base editor system comprising a codon-optimized nucleic acid encoding a Cas9 protein fused to a deaminase, wherein the Cas9 protein fusion is capable of binding to the guide RNA and of editing the target nucleic acid sequence complementary to the guide RNA.

16. A method of treating a disease or disorder, comprising administering to a subject in need thereof, the pharmaceutical composition of claim 14.

17. The method of claim 16, wherein the disease or disorder is hereditary transthyretin amyloidosis, cardiomyopathy, polyneuropathy or senile cardiac amyloidosis.

18. The method of claim 16, wherein the pharmaceutical composition is administered by a route selected from intravenous, intradermal, transdermal, intranasal, intramuscular, subcutaneous, transmucosal or oral.

19. The method of claim 1, wherein the LNP is delivered to liver.

The application's sequence listing, which the Patent Office published only in electronic form, follows.

SEQUENCE LISTING (5772 sequences)

SEQ ID NO: 1 - RNA, 20 nt, synthetic construct
  misc_feature 1..20: note = Description of Artificial Sequence: Synthetic oligonucleotide
  source 1..20: mol_type = other RNA
gccatcctgccaagaatgag

SEQ ID NO: 2 - RNA, 20 nt, synthetic construct
  misc_feature 1..20: note = Description of Artificial Sequence: Synthetic oligonucleotide
  source 1..20: mol_type = other RNA
gccatcctgccaagaacgag

SEQ ID NO: 3 - RNA, 20 nt, synthetic construct
  misc_feature 1..20: note = Description of Artificial Sequence: Synthetic oligonucleotide
  source 1..20: mol_type = other RNA
gcaacttacccagaggcaaa

SEQ ID NO: 4 - RNA, 20 nt, synthetic construct
  misc_feature 1..20: note = Description of Artificial Sequence: Synthetic oligonucleotide
  source 1..20: mol_type = other RNA
tataggaaaaccagtgagtc

SEQ ID NO: 5 - RNA, 20 nt, synthetic construct
  misc_feature 1..20: note = Description of Artificial Sequence: Synthetic oligonucleotide
  source 1..20: mol_type = other RNA
tactcacctctgcatgctca

SEQ ID NO: 6 - RNA, 20 nt, synthetic construct
  misc_feature 1..20: note = Description of Artificial Sequence: Synthetic oligonucleotide
  source 1..20: mol_type = other RNA
gccatcctgccaagaatgag

SEQ ID NO: 7 - RNA, 20 nt, synthetic construct
  misc_feature 1..20: note = Description of Artificial Sequence: Synthetic oligonucleotide
  source 1..20: mol_type = other RNA
gccatcctgccaagaacgag

SEQ ID NO: 8 - RNA, 20 nt, synthetic construct
  misc_feature 1..20: note = Description of Artificial Sequence: Synthetic oligonucleotide
  source 1..20: mol_type = other RNA
gcaacttacccagaggcaaa

SEQ ID NO: 9 - RNA, 20 nt, synthetic construct
  misc_feature 1..20: note = Description of Artificial Sequence: Synthetic oligonucleotide
  source 1..20: mol_type = other RNA
tataggaaaaccagtgagtc

SEQ ID NO: 10 - RNA, 20 nt, synthetic construct
  misc_feature 1..20: note = Description of Artificial Sequence: Synthetic oligonucleotide
  source 1..20: mol_type = other RNA
tactcacctctgcatgctca

SEQ ID NO: 11 - RNA, 100 nt, synthetic construct
  misc_feature 1..100: note = Description of Artificial Sequence: Synthetic polynucleotide
  source 1..100: mol_type = other RNA
gccatcctgccaagaatgaggttttagagctagaaatagcaagttaaaataaggctagtccgttatcaacttgaaaaagtggcaccgagtcggtgctttt

SEQ ID NO: 12 - RNA, 97 nt, synthetic construct
  misc_feature 1..97: note = Description of Artificial Sequence: Synthetic oligonucleotide
  source 1..97: mol_type = other RNA
atcctgccaagaacgaggttttagagctagaaatagcaagttaaaataaggctagtccgttatcaacttgaaaaagtggcaccgagtcggtgctttt

SEQ ID NO: 13 - RNA, 100 nt, synthetic construct
  misc_feature 1..100: note = Description of Artificial Sequence: Synthetic polynucleotide
  source 1..100: mol_type = other RNA
gcaacttacccagaggcaaagttttagagctagaaatagcaagttaaaataaggctagtccgttatcaacttgaaaaagtggcaccgagtcggtgctttt

SEQ ID NO: 14 - RNA, 100 nt, synthetic construct
  misc_feature 1..100: note = Description of Artificial Sequence: Synthetic polynucleotide
  source 1..100: mol_type = other RNA
tataggaaaaccagtgagtcgttttagagctagaaatagcaagttaaaataaggctagtccgttatcaacttgaaaaagtggcaccgagtcggtgctttt

SEQ ID NO: 15 - RNA, 100 nt, synthetic construct
  misc_feature 1..100: note = Description of Artificial Sequence: Synthetic polynucleotide
  source 1..100: mol_type = other RNA
tactcacctctgcatgctcagttttagagctagaaatagcaagttaaaataaggctagtccgttatcaacttgaaaaagtggcaccgagtcggtgctttt

SEQ ID NO: 16 - RNA, 100 nt, synthetic construct
  misc_feature 1..100: note = Description of Artificial Sequence: Synthetic polynucleotide
  source 1..100: mol_type = other RNA
gccatcctgccaagaacgaggttttagagctagaaatagcaagttaaaataaggctagtccgttatcaacttgaaaaagtggcaccgagtcggtgctttt

SEQ ID NO: 17 - RNA, 100 nt, synthetic construct; identical to SEQ ID NO: 14
  misc_feature 1..100: note = Description of Artificial Sequence: Synthetic polynucleotide
  source 1..100: mol_type = other RNA

SEQ ID NO: 18 - RNA, 100 nt, synthetic construct; identical to SEQ ID NO: 11
  misc_feature 1..100: note = Description of Artificial Sequence: Synthetic polynucleotide
  source 1..100: mol_type = other RNA

SEQ ID NO: 19 - RNA, 100 nt, synthetic construct; identical to SEQ ID NO: 16
  misc_feature 1..100: note = Description of Artificial Sequence: Synthetic polynucleotide
  source 1..100: mol_type = other RNA

SEQ ID NO: 20 - RNA, 100 nt, synthetic construct; identical to SEQ ID NO: 13
  misc_feature 1..100: note = Description of Artificial Sequence: Synthetic polynucleotide
  source 1..100: mol_type = other RNA

SEQ ID NO: 21 - RNA, 100 nt, synthetic construct; identical to SEQ ID NO: 14
  misc_feature 1..100: note = Description of Artificial Sequence: Synthetic polynucleotide
  source 1..100: mol_type = other RNA

SEQ ID NO: 22 - RNA, 100 nt, synthetic construct; identical to SEQ ID NO: 15
  misc_feature 1..100: note = Description of Artificial Sequence: Synthetic polynucleotide
  source 1..100: mol_type = other RNA

SEQ ID NO: 23 - protein, 147 aa, Homo sapiens
MASHRLLLLCLAGLVFVSEAGPTGTGESKCPLMVKVLDAVRGSPAINVAVHVFRKAADDTWEPFASGKTSESGELHGLTTEEEFVEGIYKVEIDTKSYWKALGISPFHEHAEVVFTANDSGPRRYTIAALLSPYSYSTTAVVTNPKE

SEQ ID NO: 24 - DNA, 20 bp, Homo sapiens
  source 1..20: mol_type = other DNA
gccatcctgccaagaatgag

SEQ ID NO: 25 - DNA, 20 bp, Homo sapiens
  source 1..20: mol_type = other DNA
gcaacttacccagaggcaaa

SEQ ID NO: 26 - DNA, 20 bp, unidentified
  misc_feature 1..20: note = Description of Unknown: Protospacer sequence
  source 1..20: mol_type = other DNA
tataggaaaaccagtgagtc

SEQ ID NO: 27 - DNA, 20 bp, unidentified
  misc_feature 1..20: note = Description of Unknown: Protospacer sequence
  source 1..20: mol_type = other DNA
tactcacctctgcatgctca

SEQ ID NO: 28 - DNA, 20 bp, Macaca fascicularis
  source 1..20: mol_type = other DNA
gccatcctgccaagaacgag

SEQ ID NO: 29 - RNA, 100 nt, synthetic construct; identical to SEQ ID NO: 16
  misc_feature 1..100: note = Description of Artificial Sequence: Synthetic polynucleotide
  source 1..100: mol_type = other RNA

SEQ ID NO: 30 - DNA, 33 bp, synthetic construct
  misc_feature 1..33: note = Description of Artificial Sequence: Synthetic oligonucleotide
  source 1..33: mol_type = other DNA
acactctttccctacacgacgctcttccgatct

SEQ ID NO: 31 - DNA, 34 bp, synthetic construct
  misc_feature 1..34: note = Description of Artificial Sequence: Synthetic oligonucleotide
  source 1..34: mol_type = other DNA
gtgactggagttcagacgtgtgctcttccgatct

SEQ ID NO: 32 - DNA, 20 bp, Homo sapiens
  source 1..20: mol_type = other DNA
gccatcctaccaggaatgaa

SEQ ID NO: 33 - DNA, 20 bp, Homo sapiens
  source 1..20: mol_type = other DNA
gccatcttgccaagaaaaag

SEQ ID NO: 34 - DNA, 21 bp, Homo sapiens
  source 1..21: mol_type = other DNA
gccatacctgccatgaatgag

SEQ ID NO: 35 - DNA, 20 bp, Homo sapiens
  source 1..20: mol_type = other DNA
gccatcctgacaggaatgag

SEQ ID NO: 36 - DNA, 20 bp, Homo sapiens
  source 1..20: mol_type = other DNA
accatcctgcaaagaatgat

SEQ ID NO: 37 - DNA, 19 bp, Homo sapiens
  source 1..19: mol_type = other DNA
gccatccaataagaatgag

SEQ ID NO: 38 - DNA, 20 bp, Homo sapiens
  source 1..20: mol_type = other DNA
gccatcctgacaagtatgag

SEQ ID NO: 39 - DNA, 20 bp, Homo sapiens
  source 1..20: mol_type = other DNA
ccatacctgccaagaatgaa

SEQ ID NO: 40 - DNA, 20 bp, Homo sapiens
  source 1..20: mol_type = other DNA
tgcatcctgccaaaaatggg

SEQ ID NO: 41 - DNA, 20 bp, Homo sapiens
  source 1..20: mol_type = other DNA
tgcatcctgccaagaagaag

SEQ ID NO: 42 - DNA, 19 bp, Homo sapiens
  source 1..19: mol_type = other DNA
gccatcctccaagaatgct

SEQ ID NO: 43 - DNA, 18 bp, Homo sapiens
  source 1..18: mol_type = other DNA
gccatctgcaagaaggag

SEQ ID NO: 44 - DNA, 20 bp, Homo sapiens
  source 1..20: mol_type = other DNA
gccatcctatcaagaataaa

SEQ ID NO: 45 - DNA, 19 bp, Homo sapiens
  source 1..19: mol_type = other DNA
tccatcctgtaagaatgag

SEQ ID NO: 46 - DNA, 20 bp, Homo sapiens
  source 1..20: mol_type = other DNA
ggccatctgccaagaaggat

SEQ ID NO: 47 - DNA, 20 bp, Homo sapiens
  source 1..20: mol_type = other DNA
accatcctgccagcaatgtg

SEQ ID NO: 48 - DNA, 20 bp, Homo sapiens
  source 1..20: mol_type = other DNA
tccatcctactaagaatgag

SEQ ID NO: 49 - DNA, 20 bp, Homo sapiens
  source 1..20: mol_type = other DNA
ggtatcctgccaagaatgga

SEQ ID NO: 50 - DNA, 20 bp, Homo sapiens
  source 1..20: mol_type = other DNA
tccatcctgccaagaattgc

SEQ ID NO: 51 - DNA, 18 bp, Homo sapiens
  source 1..18: mol_type = other DNA
gccatctgcaagaatgag

SEQ ID NO: 52 - DNA, 19 bp, Homo sapiens
  source 1..19: mol_type = other DNA
gccatcctgcaaatatgag

SEQ ID NO: 53 - DNA, 20 bp, Homo sapiens
  source 1..20: mol_type = other DNA
accatcctgtcaagaatcaa

SEQ ID NO: 54 - DNA, 20 bp, Homo sapiens
  source 1..20: mol_type = other DNA
gccatactaacaagaatgag

SEQ ID NO: 55 - DNA, 20 bp, Homo sapiens
  source 1..20: mol_type = other DNA
gtgatcctgccaggaataag

SEQ ID NO: 56 - DNA, 19 bp, Homo sapiens
  source 1..19: mol_type = other DNA
gccatcaagcaagaatgag

SEQ ID NO: 57 - DNA, 20 bp, Homo sapiens
  source 1..20: mol_type = other DNA
gccatcctcacaagtatgag

SEQ ID NO: 58 - DNA, 19 bp, Homo sapiens
  source 1..19: mol_type = other DNA
accatccagcaagaatgag

SEQ ID NO: 59 - DNA, 19 bp, Homo sapiens
  source 1..19: mol_type = other DNA
gccatatgccaaaaaggag

SEQ ID NO: 60 - DNA, 20 bp, Homo sapiens
  source 1..20: mol_type = other DNA
gacatcctgtcaaggatcag

SEQ ID NO: 61 - DNA, 18 bp, Homo sapiens
  source 1..18: mol_type = other DNA
gccatagccaaaaatgaa

SEQ ID NO: 62 - DNA, 20 bp, Homo sapiens
  source 1..20: mol_type = other DNA
gccataagccaaagaatgac

SEQ ID NO: 63 - DNA, 20 bp, Homo sapiens
  source 1..20: mol_type = other DNA
gccatcctaacaagtatgag

SEQ ID NO: 64 - DNA, 19 bp, Homo sapiens
  source 1..19: mol_type = other DNA
catatcctgccagaatgag

SEQ ID NO: 65 - DNA, 21 bp, Homo sapiens
  source 1..21: mol_type = other DNA
tacatcctaccaaggaatcag

SEQ ID NO: 66 - DNA, 20 bp, Homo sapiens
  source 1..20: mol_type = other DNA
cccatcctgccaagaagtgt

SEQ ID NO: 67 - DNA, 19 bp, Homo sapiens
  source 1..19: mol_type = other DNA
gccatcctacaaaaatgag

SEQ ID NO: 68 - DNA, 20 bp, Homo sapiens
  source 1..20: mol_type = other DNA
gtcatcctgccaggaatgaa

SEQ ID NO: 69 - DNA, 21 bp, Homo sapiens
  source 1..21: mol_type = other DNA
gccatatctgccaagaatgcg

SEQ ID NO: 70 - DNA, 20 bp, Homo sapiens
  source 1..20: mol_type = other DNA
tccatcctgtcaagaatgtg

SEQ ID NO: 71 - DNA, 18 bp, Homo sapiens
  source 1..18: mol_type = other DNA
tccatcctccagaatgag

SEQ ID NO: 72 - DNA, 20 bp, Homo sapiens
  source 1..20: mol_type = other DNA
gccatgctgccaagaatgat

SEQ ID NO: 73 - DNA, 19 bp, Homo sapiens
  source 1..19: mol_type = other DNA
gctatcctgccagaatgag

SEQ ID NO: 74 - DNA, 20 bp, Homo sapiens
  source 1..20: mol_type = other DNA
tgcatcctgacaagaaatag

SEQ ID NO: 75 - DNA, 18 bp, Homo sapiens
  source 1..18: mol_type = other DNA
tccatagccaagaatgag

SEQ ID NO: 76 - DNA, 19 bp, Homo sapiens
  source 1..19: mol_type = other DNA
accatctgtcaagaatgag

SEQ ID NO: 77 - DNA, 20 bp, Homo sapiens
  source 1..20: mol_type = other DNA
gccatcccgccaggaattat

SEQ ID NO: 78 - DNA, 20 bp, Homo sapiens
  source 1..20: mol_type = other DNA
accatccttccaagaagatg

SEQ ID NO: 79 - DNA, 20 bp, Homo sapiens
  source 1..20: mol_type = other DNA
acaaattacccagaggaaaa

SEQ ID NO: 80 - DNA, 20 bp, Homo sapiens
  source 1..20: mol_type = other DNA
tcaacttacccagagtcaaa

SEQ ID NO: 81 - DNA, 20 bp, Homo sapiens
  source 1..20: mol_type = other DNA
gcaacttgcccagaggcaca

SEQ ID NO: 82 - DNA, 20 bp, Homo sapiens
  source 1..20: mol_type = other DNA
gcaacatacccagtggcaaa

SEQ ID NO: 83 - DNA, 20 bp, Homo sapiens
  source 1..20: mol_type = other DNA
gcagcctacccagaggcaaa

SEQ ID NO: 84 - DNA, 20 bp, Homo sapiens
  source 1..20: mol_type = other DNA
gcaactcccccagaggcaaa

SEQ ID NO: 85 - DNA, 20 bp, Homo sapiens
  source 1..20: mol_type = other DNA
tagaggaaaaccagtcagtc

SEQ ID NO: 86 - DNA, 20 bp, Homo sapiens
  source 1..20: mol_type = other DNA
cataggaaaaccagtgagtt

SEQ ID NO: 87 - DNA, 20 bp, Homo sapiens
  source 1..20: mol_type = other DNA
taaaggaaaaccagtgggtc

SEQ ID NO: 88 - DNA, 20 bp, Homo sapiens
  source 1..20: mol_type = other DNA
tacacaactgtgcatgctca

SEQ ID NO: 89 - DNA, 20 bp, Homo sapiens
  source 1..20: mol_type = other DNA
tattcacctctgcatgctct

SEQ ID NO: 90 - DNA, 20 bp, Homo sapiens
  source 1..20: mol_type = other DNA
tacttacctctgcttgctca

SEQ ID NO: 91 - DNA, 20 bp, Homo sapiens
  source 1..20: mol_type = other DNA
tacacacctctacatgctca

SEQ ID NO: 92 - DNA, 23 bp, Homo sapiens
  source 1..23: mol_type = other DNA
tgcatcctgccaaaaatggggag

SEQ ID NO: 93 - DNA, 23 bp, Homo sapiens
  source 1..23: mol_type = other DNA
gccatcctaacaagtatgaggtg

SEQ ID NO: 94 - DNA, 23 bp, Homo sapiens
  source 1..23: mol_type = other DNA
gccataagccaaagaatgactgg

SEQ ID NO: 95 - DNA, 21 bp, Homo sapiens
  source 1..21: mol_type = other DNA
gccatccagaagaatgaaaag

SEQ ID NO: 96 - DNA, 22 bp, Homo sapiens
  source 1..22: mol_type = other DNA
gctatcctccaaggatgagcga

SEQ ID NO: 97 - DNA, 22 bp, Homo sapiens
  source 1..22: mol_type = other DNA
gccaccctccaagaagaagggg

SEQ ID NO: 98 - DNA, 22 bp, Homo sapiens
  source 1..22: mol_type = other DNA
gccatgtgccaagaatggtagg

SEQ ID NO: 99 - DNA, 22 bp, Homo sapiens
  source 1..22: mol_type = other DNA
tgcatcctgcaagcatgagtgg

SEQ ID NO: 100 - DNA, 23 bp, Homo sapiens
  source 1..23: mol_type = other DNA
aaaatcctaccaagaatgatgtg

SEQ ID NO: 101 - DNA, 22 bp, Homo sapiens
  source 1..22: mol_type = other DNA
tccatcctccaagaagaatggg

SEQ ID NO: 102 - DNA, 22 bp, Homo sapiens
  source 1..22: mol_type = other DNA
gccatccaccaagaaagtgggg

SEQ ID NO: 103 - DNA, 22 bp, Homo sapiens
  source 1..22: mol_type = other DNA
gccatctgccagcaatgagagg

SEQ ID NO: 104 - DNA, 23 bp, Homo sapiens
  source 1..23: mol_type = other DNA
gtaatccttacaagaatgagaga

SEQ ID NO: 105 - DNA, 23 bp, Homo sapiens
  source 1..23: mol_type = other DNA
gcatacctgccaagaatggacag

SEQ ID NO: 106 - DNA, 23 bp, Homo sapiens
  source 1..23: mol_type = other DNA
gccatcctgccaggagtgtggct

SEQ ID NO: 107 - DNA, 23 bp, Homo sapiens
  source 1..23: mol_type = other DNA
tacatcctgacaagaaaggggag

SEQ ID NO: 108 - DNA, 23 bp, Homo sapiens
  source 1..23: mol_type = other DNA
tccatactatcaagaatgagaaa

SEQ ID NO: 109 - DNA, 22 bp, Homo sapiens
  source 1..22: mol_type = other DNA
accatctgctaagaatgaagtg

SEQ ID NO: 110 - DNA, 23 bp, Homo sapiens
  source 1..23: mol_type = other DNA
aactacctgccaagtatgtgggg

SEQ ID NO: 111 - DNA, 22 bp, Homo sapiens
  source 1..22: mol_type = other DNA
accatcctgaaggaatgaggag

SEQ ID NO: 112 - DNA, 23 bp, Homo sapiens
  source 1..23: mol_type = other DNA
accatccagacaacaatgtgggg

SEQ ID NO: 113 - DNA, 24 bp, Homo sapiens
  source 1..24: mol_type = other DNA
accatcctgccaagaaaccagcag

SEQ ID NO: 114 - DNA, 23 bp, Homo sapiens
  source 1..23: mol_type = other DNA
gctataataccaagaatgatagg

SEQ ID NO: 115 - DNA, 22 bp, Homo sapiens
  source 1..22: mol_type = other DNA
gccatccaccaagaaggtggag

SEQ ID NO: 116 - DNA, 23 bp, Homo sapiens
  source 1..23: mol_type = other DNA
gccatcctaacaataatgaagtg

SEQ ID NO: 117 - DNA, 23 bp, Homo sapiens
  source 1..23: mol_type = other DNA
aagaacctaccaacaatgagagg

SEQ ID NO: 118 - DNA, 21 bp, Homo sapiens
  source 1..21: mol_type = other DNA
gccatccttcaggatgagggg

SEQ ID NO: 119 - DNA, 23 bp, Homo sapiens
  source 1..23: mol_type = other DNA
atcatcctgcccaggatatgggg

SEQ ID NO: 120 - DNA, 23 bp, Homo sapiens
  source 1..23: mol_type = other DNA
gtgctaatgccaagaatgtgtgg

SEQ ID NO: 121 - DNA, 23 bp, Homo sapiens
  source 1..23: mol_type = other DNA
acagtcctgccaagaatgagagg

SEQ ID NO: 122 - DNA, 23 bp, Homo sapiens
  source 1..23: mol_type = other DNA
gccatcctgctgataatgaggag

SEQ ID NO: 123 - DNA, 22 bp, Homo sapiens
  source 1..22: mol_type = other DNA
gccatcctgcagaaatgagtga

SEQ ID NO: 124 - DNA, 23 bp, Homo sapiens
  source 1..23: mol_type = other DNA
tacataccaccaagaatgagtgc

SEQ ID NO: 125 - DNA, 22 bp, Homo sapiens
  source 1..22: mol_type = other DNA
gccatgtgccaagaaggaatgg

SEQ ID NO: 126 - DNA, 23 bp, Homo sapiens
  source 1..23: mol_type = other DNA
tccttcctatcaagaatgtgaag

SEQ ID NO: 127 - DNA, 22 bp, Homo sapiens
  source 1..22: mol_type = other DNA
ggcatcctccaagaatagggga

SEQ ID NO: 128 - DNA, 23 bp, Homo sapiens
  source 1..23: mol_type = other DNA
gccattctgacaagaatagtgag

SEQ ID NO: 129 - DNA, 22 bp, Homo sapiens
  source 1..22: mol_type = other DNA
accatctagccagaatgtgtgg

SEQ ID NO: 130 - DNA, 23 bp, Homo sapiens
  source 1..23: mol_type = other DNA
tacatcctgacaagaaggaaatg

SEQ ID NO: 131 - DNA, 23 bp, Homo sapiens
  source 1..23: mol_type = other DNA
gccatcctaacaaatatgaggca

SEQ ID NO: 132 - DNA, 23 bp, Homo sapiens
  source 1..23: mol_type = other DNA
gcccttaagccaagaatgaggtg

SEQ ID NO: 133 - DNA, 22 bp, Homo sapiens
  source 1..22: mol_type = other DNA
gctatcatccaagaatgactgg

SEQ ID NO: 134 - DNA, 24 bp, Homo sapiens
  source 1..24: mol_type = other DNA
tccatcactcccaacaatgagtgg

SEQ ID NO: 135 - DNA, 22 bp, Homo sapiens
  source 1..22: mol_type = other DNA
gccatcagcaaagaatgcaagg

SEQ ID NO: 136 - DNA, 22 bp, Homo sapiens
  source 1..22: mol_type = other DNA
tgcatcctgacaaaataagagg

SEQ ID NO: 137 - DNA, 22 bp, Homo sapiens
  source 1..22: mol_type = other DNA
tccatatgccaagagggagtgg

SEQ ID NO: 138 - DNA, 21 bp, Homo sapiens
  source 1..21: mol_type = other DNA
gccattgccaacaatgtggag

SEQ ID NO: 139 - DNA, 21 bp, Homo sapiens
  source 1..21: mol_type = other DNA
ggcactgctaagaatgatagg

SEQ ID NO: 140 - DNA, 23 bp, Homo sapiens
  source 1..23: mol_type = other DNA
caaatgctgccaaggatgaggag

SEQ ID NO: 141 - DNA, 22 bp, Homo sapiens
  source 1..22: mol_type = other DNA
gtgatcctgaaagaatgagaag

SEQ ID NO: 142 - DNA, 23 bp, Homo sapiens
  source 1..23: mol_type = other DNA
acaaccctcccaagaatgatggc

SEQ ID NO: 143 - DNA, 23 bp, Homo sapiens
  source 1..23: mol_type = other DNA
gccatcctcacaataatgagtga

SEQ ID NO: 144 - DNA, 22 bp, Homo sapiens
  source 1..22: mol_type = other DNA
tccacctgccaaggatggggtg

SEQ ID NO: 145 - DNA, 23 bp, Homo sapiens
  source 1..23: mol_type = other DNA
gtcatccagccaagagtgggatg

SEQ ID NO: 146 - DNA, 23 bp, Homo sapiens
  source 1..23: mol_type = other DNA
gccatcctgcagagaataaagaa

SEQ ID NO: 147 - DNA, 22 bp, Homo sapiens
  source 1..22: mol_type = other DNA
cccacccttgaagaatgagtgg

SEQ ID NO: 148 - DNA, 22 bp, Homo sapiens
  source 1..22: mol_type = other DNA
gccatcctgctaggatgtggag

SEQ ID NO: 149 - DNA, 22 bp, Homo sapiens
  source 1..22: mol_type = other DNA
gatatccagcaagaatgacagg

SEQ ID NO: 150 - DNA, 23 bp, Homo sapiens
  source 1..23: mol_type = other DNA
gccatcttgcccaaaatgtgcgg

SEQ ID NO: 151 - DNA, 22 bp, Homo sapiens
  source 1..22: mol_type = other DNA
gccatcccccaagaatgaaccc

SEQ ID NO: 152 - DNA, 22 bp, Homo sapiens
  source 1..22: mol_type = other DNA
accatcattcaagaatgagtgt

SEQ ID NO: 153 - DNA, 23 bp, Homo sapiens
  source 1..23: mol_type = other DNA
gccatcctagtaggaatgaagtg

SEQ ID NO: 154 - DNA, 23 bp, Homo sapiens
  source 1..23: mol_type = other DNA
tcctaccagccatgaatgagggt

SEQ ID NO: 155 - DNA, 23 bp, Homo sapiens
  source 1..23: mol_type = other DNA
tgcagcctggcaggaatgtgtgg

SEQ ID NO: 156 - DNA, 23 bp, Homo sapiens
  source 1..23: mol_type = other DNA
accaacctgtcaagaagttgtgg

SEQ ID NO: 157 - DNA, 22 bp, Homo sapiens
  source 1..22: mol_type = other DNA
gccacatgctaggaataagagg

SEQ ID NO: 158 - DNA, 22 bp, Homo sapiens
  source 1..22: mol_type = other DNA
gccatcagcaatgtatgagagg

SEQ ID NO: 159 - DNA, 23 bp, Homo sapiens
  source 1..23: mol_type = other DNA
gccattctaacaagtatgaggtg

SEQ ID NO: 160 - DNA, 23 bp, Homo sapiens
  source 1..23: mol_type = other DNA
gcccatcagccaaggaggagagg

SEQ ID NO: 161 - DNA, 23 bp, Homo sapiens
  source 1..23: mol_type = other DNA
gccatcttgccaagaaaaagggg

SEQ ID NO: 162 - DNA, 23 bp, Homo sapiens
  source 1..23: mol_type = other DNA
ggtatcctgccaagaatggatgg

SEQ ID NO: 163 - DNA, 23 bp, Homo sapiens
  source 1..23: mol_type = other DNA
tccatcctgccaagaattgcagg

SEQ ID NO: 164 - DNA, 22 bp, Homo sapiens
  source 1..22: mol_type = other DNA
accatccagcaagaatgaggta

SEQ ID NO: 165 - DNA, 21 bp, Homo sapiens
  source 1..21: mol_type = other DNA
tccatcctccagaatgagaga

SEQ ID NO: 166 - DNA, 21 bp, Homo sapiens
  source 1..21: mol_type = other DNA
tccatagccaagaatgagaag

SEQ ID NO: 167 - DNA, 23 bp, Homo sapiens
  source 1..23: mol_type = other DNA
aatatcctgccaagaacaagcag

SEQ ID NO: 168 - DNA, 22 bp, Homo sapiens
  source 1..22: mol_type = other DNA
accacccagcaagaatgaggtg

SEQ ID NO: 169 - DNA, 22 bp, Homo sapiens
  source 1..22: mol_type = other DNA
cccatccagccagaatgagaag

SEQ ID NO: 170 - DNA, 23 bp, Homo sapiens
  source 1..23: mol_type = other DNA
accatcatgccaagaaaaagagg

SEQ ID NO: 171 - DNA, 23 bp, Homo sapiens
  source 1..23: mol_type = other DNA
gaccatcagccaagagtgagtgg

SEQ ID NO: 172 - DNA, 22 bp, Homo sapiens
  source 1..22: mol_type = other DNA
accatcctgcaagaatgttgga

SEQ ID NO: 173 - DNA, 23 bp, Homo sapiens
  source 1..23: mol_type = other DNA
gccatcctaacaagtatgagatg

SEQ ID NO: 174 - DNA, 23 bp, Homo sapiens
  source 1..23: mol_type = other DNA
ataatcctgccaataatgacggt

SEQ ID NO: 175 - DNA, 23 bp, Homo sapiens
  source 1..23: mol_type = other DNA
gccattctgacaagtatgagatg

SEQ ID NO: 176 - DNA, 21 bp, Homo sapiens
  source 1..21: mol_type = other DNA
gccagtgccaagaatgagatg

SEQ ID NO: 177 - DNA, 23 bp, Homo sapiens
  source 1..23: mol_type = other DNA
cccatcctgccaagataaatggt

SEQ ID NO: 178 - DNA, 22 bp, Homo sapiens
  source 1..22: mol_type = other DNA
tccatcttgcaagaatgaacgg

SEQ ID NO: 179 - DNA, 24 bp, Homo sapiens
  source 1..24: mol_type = other DNA
gccatcctgaccaacaatgattgg

SEQ ID NO: 180 - DNA, 23 bp, Homo sapiens
  source 1..23: mol_type = other DNA
gccatcctaacaagtatgaagtg

SEQ ID NO: 181 - DNA, 22 bp, Homo sapiens
  source 1..22: mol_type = other DNA
accatctgcccagaatgaaggg

SEQ ID NO: 182 - DNA, 23 bp, Homo sapiens
  source 1..23: mol_type = other DNA
tacaacctatcaagaatgagcga

SEQ ID NO: 183 - DNA, 23 bp, Homo sapiens
  source 1..23: mol_type = other DNA
gccagcctgcccagaatgaatgg

SEQ ID NO: 184 - DNA, 22 bp, Homo sapiens
  source 1..22: mol_type = other DNA
gccatatgccaaagatgaaggg

SEQ ID NO: 185 - DNA, 24 bp, Homo sapiens
  source 1..24: mol_type = other DNA
gccatcactgccaaaaatggggta

SEQ ID NO: 186 - DNA, 22 bp, Homo sapiens
  source 1..22: mol_type = other DNA
gccatccagacagaatgagatg

SEQ ID NO: 187 - DNA, 24 bp, Homo sapiens
  source 1..24: mol_type = other DNA
gacttactgccaaagaatgatggg

SEQ ID NO: 188 - DNA, 21 bp, Homo sapiens
  source 1..21: mol_type = other DNA
gccatccccaggaaggagggg

SEQ ID NO: 189 - DNA, 21 bp, Homo sapiens
  source 1..21: mol_type = other DNA
gccaacctaccaaataagtgg

SEQ ID NO: 190 - DNA, 23 bp, Homo sapiens
  source 1..23: mol_type = other DNA
gccatcctaacaggaatgagatg

SEQ ID NO: 191 - DNA, 23 bp, Homo sapiens
  source 1..23: mol_type = other DNA
gccatccaaccaagaatgatgct

SEQ ID NO: 192 - DNA, 23 bp, Homo sapiens
  source 1..23: mol_type = other DNA
ccaatactgacaagagtgagagg

SEQ ID NO: 193 - DNA, 21 bp, Homo sapiens
  source 1..21: mol_type = other DNA
gccattaaaaagaatgagtgg

SEQ ID NO: 194 - DNA, 21 bp, Homo sapiens
  source 1..21: mol_type = other DNA
gccatactgacaagagagtgg

SEQ ID NO: 195 - DNA, 23 bp, Homo sapiens
  source 1..23: mol_type = other DNA
ggcataatgccaagaatgaggga

SEQ ID NO: 196 - DNA, 21 bp, Homo sapiens
  source 1..21: mol_type = other DNA
gctatcctgccaaaagagtgg

SEQ ID NO: 197 - DNA, 23 bp, Homo sapiens
  source 1..23: mol_type = other DNA
cctttcctatcaagaaggagagg

SEQ ID NO: 198 - DNA, 23 bp, Homo sapiens
  source 1..23: mol_type = other DNA
gccatcctgactagtatgagacg

SEQ ID NO: 199 - DNA, 24 bp, Homo sapiens
  source 1..24: mol_type = other DNA
accatacctgctgagaatgagaga

SEQ ID NO: 200 - DNA, 23 bp, Homo sapiens
  source 1..23: mol_type = other DNA
gccatcctaccaggtgtgaggtg

SEQ ID NO: 201 - DNA, 24 bp, Homo sapiens
  source 1..24: mol_type = other DNA
gctattcctgccaaaaatggatgg

SEQ ID NO: 202 - DNA, 22 bp, Homo sapiens
  source 1..22: mol_type = other DNA
ttcatcctgccaaaaccagggg

SEQ ID NO: 203 - DNA, 23 bp, Homo sapiens
  source 1..23: mol_type = other DNA
tctgcactgccaagagtgagtgg

SEQ ID NO: 204 - DNA, 23 bp, Homo sapiens
  source 1..23: mol_type = other DNA
gccatcctgacaggtatgaggtg

SEQ ID NO: 205 - DNA, 22 bp, Homo sapiens
  source 1..22: mol_type = other DNA
gccatcctacagtaatgaatgg

SEQ ID NO: 206 - DNA, 21 bp, Homo sapiens
  source 1..21: mol_type = other DNA
ttcatcctgaagaatgagtgg

SEQ ID NO: 207 - DNA, 23 bp, Homo sapiens
  source 1..23: mol_type = other DNA
gccattaagccaaggatcagggg

SEQ ID NO: 208 - DNA, 23 bp, Homo sapiens
  source 1..23: mol_type = other DNA
attaacctgccaggaatgatggg

SEQ ID NO: 209 - DNA, 23 bp, Homo sapiens
  source 1..23: mol_type = other DNA
aatattctgtcaagaatgaggtg

SEQ ID NO: 210 - DNA, 23 bp, Homo sapiens
  source 1..23: mol_type = other DNA
gtattcctgccaagaatgtgtaa

SEQ ID NO: 211 - DNA, 23 bp, Homo sapiens
  source 1..23: mol_type = other DNA
gccatgagccaaagaatgagaag

SEQ ID NO: 212 - DNA, 24 bp, Homo sapiens
  source 1..24: mol_type = other DNA
cccatcactgccaagaatgaagta

SEQ ID NO: 213 - DNA, 23 bp, Homo sapiens
  source 1..23: mol_type = other DNA
gccatcacaagaagaatgaaagg

SEQ ID NO: 214 - DNA, 22 bp, Homo sapiens
  source 1..22: mol_type = other DNA
gccatctagcaggaatgtgagg

SEQ ID NO: 215 - DNA, 22 bp, Homo sapiens
  source 1..22: mol_type = other DNA
gccatgtgccaagaagaaggag

SEQ ID NO: 216 - DNA, 22 bp, Homo sapiens
  source 1..22: mol_type = other DNA
gacaacctgccagaatgaaaag

SEQ ID NO: 217 - DNA, 24 bp, Homo sapiens
  source 1..24: mol_type = other DNA
ttcatcctgccagagaatgatggg

SEQ ID NO: 218 - DNA, 24 bp, Homo sapiens
  source 1..24: mol_type = other DNA
tacatcctggccaagaatgtggtg

SEQ ID NO: 219 - DNA, 24 bp, Homo sapiens
  source 1..24: mol_type = other DNA
tccatccagcccaataatgagagg

SEQ ID NO: 220 - DNA, 23 bp, Homo sapiens
  source 1..23: mol_type = other DNA
gccaacctgtaaagagtgagggg

SEQ ID NO: 221 - DNA, 23 bp, Homo sapiens
  source 1..23: mol_type = other DNA
tccatattgccatgaatgacagg

SEQ ID NO: 222 - DNA, 21 bp, Homo sapiens
  source 1..21: mol_type = other DNA
accaatgccaaaaatgagagg

SEQ ID NO: 223 - DNA, 23 bp, Homo sapiens
  source 1..23: mol_type = other DNA
gccatcctaacaggtatgaggtg

SEQ ID NO: 224 - DNA, 23 bp, Homo sapiens
  source 1..23: mol_type = other DNA
aatatcctgccaagaaagagatg

SEQ ID NO: 225 - DNA, 22 bp, Homo sapiens
  source 1..22: mol_type = other DNA
gccatatgccaagaataacaga

SEQ ID NO: 226 - DNA, 23 bp, Homo sapiens
  source 1..23: mol_type = other DNA
tccatacaatcaagaatgagagg

SEQ ID NO: 227 - DNA, 22 bp, Homo sapiens
  source 1..22: mol_type = other DNA
gccatttatcaagagtgagagg

SEQ ID NO: 228 - DNA, 23 bp, Homo sapiens
  source 1..23: mol_type = other DNA
cagttcctgccaagaatgcaggg

SEQ ID NO: 229 - DNA, 23 bp, Homo sapiens
  source 1..23: mol_type = other DNA
gagaacatgccaaggatgagtag

SEQ ID NO: 230 - DNA, 23 bp, Homo sapiens
  source 1..23: mol_type = other DNA
tccatgttgccaagaatgacagg

SEQ ID NO: 231 - DNA, 22 bp, Homo sapiens
  source 1..22: mol_type = other DNA
tccatctgtcatgaatgagtga

SEQ ID NO: 232 - DNA, 23 bp, Homo sapiens
  source 1..23: mol_type = other DNA
gccattctgactagaatgagatg

SEQ ID NO: 233 - DNA, 23 bp, Homo sapiens
  source 1..23: mol_type = other DNA
cccaatgtgccaagcatgagtgt

SEQ ID NO: 234 - DNA, 23 bp, Homo sapiens
  source 1..23: mol_type = other DNA
gccatccctgcagtaatgagtgg

SEQ ID NO: 235 - DNA, 24 bp, Homo sapiens
  source 1..24: mol_type = other DNA
gccatccctgcaattaatgagggg

SEQ ID NO: 236 - DNA, 23 bp, Homo sapiens
  source 1..23: mol_type = other DNA
accctcccaccaagaatgggaga

SEQ ID NO: 237 - DNA, 23 bp, Homo sapiens
  source 1..23: mol_type = other DNA
gccattctactcagaatgagtag

SEQ ID NO: 238 - DNA, 21 bp, Homo sapiens
  source 1..21: mol_type = other DNA
ggccctgacaaaaatgagagg

SEQ ID NO: 239 - DNA, 21 bp, Homo sapiens
  source 1..21: mol_type = other DNA
gccaacctaaagaatgggagg

SEQ ID NO: 240 - DNA, 21 bp, Homo sapiens
  source 1..21: mol_type = other DNA
cccatccctcagaatgagagg

SEQ ID NO: 241 - DNA, 21 bp, Homo sapiens
  source 1..21: mol_type = other DNA
gacatcctacagaatgagaga

SEQ ID NO: 242 - DNA, 22 bp, Homo sapiens
  source 1..22: mol_type = other DNA
gccatgtggcaagaatgtgtgg

SEQ ID NO: 243 - DNA, 22 bp, Homo sapiens
  source 1..22: mol_type = other DNA
accatcctccaaggagcagggg

SEQ ID NO: 244 - DNA, 23 bp, Homo sapiens
  source 1..23: mol_type = other DNA
gccatcctaccaggaatgaatgg

SEQ ID NO: 245 - DNA, 23 bp, Homo sapiens
  source 1..23: mol_type = other DNA
accatcctgcaaagaatgatggc

SEQ ID NO: 246 - DNA, 23 bp, Homo sapiens
  source 1..23: mol_type = other DNA
ccatacctgccaagaatgaacag

SEQ ID NO: 247 - DNA, 23 bp, Homo sapiens
  source 1..23: mol_type = other DNA
gccatcctatcaagaataaacag

SEQ ID NO: 248 - DNA, 22 bp, Homo sapiens
  source 1..22: mol_type = other DNA
gccatcctacaaaaatgaggga

SEQ ID NO: 249 - DNA, 23 bp, Homo sapiens
  source 1..23: mol_type = other DNA
cccatcctgccaagaagtgtggt

SEQ ID NO: 250 - DNA, 22 bp, Homo sapiens
  source 1..22: mol_type = other DNA
gctatcctgccagaatgagagc

SEQ ID NO: 251 - DNA, 23 bp, Homo sapiens
  source 1..23: mol_type = other DNA
gccatcctgccatgagtgatagg

SEQ ID NO: 252 - DNA, 23 bp, Homo sapiens
  source 1..23: mol_type = other DNA
gccatcctgacaagtatgatgtg

SEQ ID NO: 253 - DNA, 23 bp, Homo sapiens
  source 1..23: mol_type = other DNA
aatatcctgacaagaatggatgg

SEQ ID NO: 254 - DNA, 23 bp, Homo sapiens
  source 1..23: mol_type = other DNA
aatatcctaccaagaatgaggtt

SEQ ID NO: 255 - DNA, 22 bp, Homo sapiens
  source 1..22: mol_type = other DNA
aacatcctgcaagaataagaag

SEQ ID NO: 256 - DNA, 23 bp, Homo sapiens
  source 1..23: mol_type = other DNA
gccatcctaacaagtatggggtg

SEQ ID NO: 257 - DNA, 23 bp, Homo sapiens
  source 1..23: mol_type = other DNA
gccatcctgccatgaaaaaggag

SEQ ID NO: 258 - DNA, 21 bp, Homo sapiens
  source 1..21: mol_type = other DNA
cccatcctgccaaatgtaggg

SEQ ID NO: 259 - DNA, 22 bp, Homo sapiens
  source 1..22: mol_type = other DNA
tccatatgccaagaatgaatag

SEQ ID NO: 260 - DNA, 23 bp, Homo sapiens
  source 1..23: mol_type = other DNA
gccataccaagaagaatgtgtgg

SEQ ID NO: 261 - DNA, 23 bp, Homo sapiens
  source 1..23: mol_type = other DNA
cctatcctgccatgaaagtggag

SEQ ID NO: 262 - DNA, 23 bp, Homo sapiens
  source 1..23: mol_type = other DNA
gccatcctgccaaatgagcgagc

SEQ ID NO: 263 - DNA, 23 bp, Homo sapiens
  source 1..23: mol_type = other DNA
tgcatactgccaaggatggatgg

SEQ ID NO: 264 - DNA, 23 bp, Homo sapiens
  source 1..23: mol_type = other DNA
gtcaatctaccaagaatgagagg

SEQ ID NO: 265 - DNA, 23 bp, Homo sapiens
  source 1..23: mol_type = other DNA
gccatcctaacaagagtgaggta

SEQ ID NO: 266 - DNA, 23 bp, Homo sapiens
  source 1..23: mol_type = other DNA
aataacctgccaagaatgagtca

SEQ ID NO: 267 - DNA, 23 bp, Homo sapiens
  source 1..23: mol_type = other DNA
tgcatcctgctaggaatgaggtg

SEQ ID NO: 268 - DNA, 22 bp, Homo sapiens
  source 1..22: mol_type = other DNA
accatctgccaagaaaaaggag

SEQ ID NO: 269 - DNA, 24 bp, Homo sapiens
  source 1..24: mol_type = other DNA
taaatcctgccaagagatgggggg

SEQ ID NO: 270 - DNA, 22 bp, Homo sapiens
  source 1..22: mol_type = other DNA
gccatccttcaaaaatgaagga

SEQ ID NO: 271 - DNA, 24 bp, Homo sapiens
  source 1..24: mol_type = other DNA
accatccatgtaaagaatcagtgg

SEQ ID NO: 272 - DNA, 24 bp, Homo sapiens
  source 1..24: mol_type = other DNA
cccatcctgacaagaaatcagcag

SEQ ID NO: 273 - DNA, 23 bp, Homo sapiens
  source 1..23: mol_type = other DNA
cttatcctgccattaatcagtgg

SEQ ID NO: 274 - DNA, 23 bp, Homo sapiens
  source 1..23: mol_type = other DNA
acccaactaccaagaatgagaag

SEQ ID NO: 275 - DNA, 23 bp, Homo sapiens
  source 1..23: mol_type = other DNA
gcaatcctgccaagcatgagctg

SEQ ID NO: 276 - DNA, 21 bp, Homo sapiens
  source 1..21: mol_type = other DNA
gccatcatgacaaatgagggg

SEQ ID NO: 277 - DNA, 23 bp, Homo sapiens
  source 1..23: mol_type = other DNA
tccaacctgccaagggtgagtgg

SEQ ID NO: 278 - DNA, 22 bp, Homo sapiens
  source 1..22: mol_type = other DNA
gccatccagccagaataaggac

SEQ ID NO: 279 - DNA, 23 bp, Homo sapiens
  source 1..23: mol_type = other DNA
accatactgctaagaattattgg

SEQ ID NO: 280 - DNA, 23 bp, Homo sapiens
  source 1..23: mol_type = other DNA
gttacactgcctagaatgaatgg

SEQ ID NO: 281 - DNA, 23 bp, Homo sapiens
  source 1..23: mol_type = other DNA
tctatcctgacaaaaatgagtga

SEQ ID NO: 282 - DNA, 23 bp, Homo sapiens
  source 1..23: mol_type = other DNA
accatcctgctaagaacaggaag

SEQ ID NO: 283 - DNA, 22 bp, Homo sapiens
  source 1..22: mol_type = other DNA
accatcctatcaagatgagcag

SEQ ID NO: 284 - DNA, 23 bp, Homo sapiens
  source 1..23: mol_type = other DNA
accatcctgccagaacttggggg

SEQ ID NO: 285 - DNA, 23 bp, Homo sapiens
  source 1..23: mol_type = other DNA
gccaccctgccaaggtggagggg

SEQ ID NO: 286 - DNA, 23 bp, Homo sapiens
  source 1..23: mol_type = other DNA
tgcatcatgccaagaaagaaggg

SEQ ID NO: 287 - DNA, 22 bp, Homo sapiens
  source 1..22: mol_type = other DNA
gccatctagcaaggaggagagg

SEQ ID NO: 288 - DNA, 22 bp, Homo sapiens
  source 1..22: mol_type = other DNA
aacatccttcaagaatgagtgt

SEQ ID NO: 289 - DNA, 23 bp, Homo sapiens
  source 1..23: mol_type = other DNA
gctatcctgacaagattgaaagg

SEQ ID NO: 290 - DNA, 21 bp, Homo sapiens
  source 1..21: mol_type = other DNA
ctcatcctgaagaataagtgg

SEQ ID NO: 291 - DNA, 23 bp, Homo sapiens
  source 1..23: mol_type = other DNA
tctttcatgccaaggatgagggg

SEQ ID NO: 292 - DNA, 23 bp, Homo sapiens
  source 1..23: mol_type = other DNA
gccatcctaacagtaatgagtga

SEQ ID NO: 293 - DNA, 23 bp, Homo sapiens
  source 1..23: mol_type = other DNA
accatcctgcaaacaatgaatga

SEQ ID NO: 294 - DNA, 22 bp, Homo sapiens
  source 1..22: mol_type = other DNA
gccatttgcaaagaatgagtag

SEQ ID NO: 295 - DNA, 23 bp, Homo sapiens
  source 1..23: mol_type = other DNA
agcatcctgccaagaagttgaga

SEQ ID NO: 296 - DNA, 22 bp, Homo sapiens
  source 1..22: mol_type = other DNA
gccaaatgccaacaatgtgagg

SEQ ID NO: 297 - DNA, 22 bp, Homo sapiens
  source 1..22: mol_type = other DNA
gccatcttacaagcatgagatg

SEQ ID NO: 298 - DNA, 23 bp, Homo sapiens
  source 1..23: mol_type = other DNA
gccatcctaacaagtgtgaggtg

SEQ ID NO: 299 - DNA, 23 bp, Homo sapiens
  source 1..23: mol_type = other DNA
cctgtcctaccaagaatcagagg

SEQ ID NO: 300 - DNA, 23 bp, Homo sapiens
  source 1..23: mol_type = other DNA
catattatgccaagaatcagtgg

SEQ ID NO: 301 - DNA, 21 bp, Homo sapiens
  source 1..21: mol_type = other DNA
gccatcgccaagaagatgtgg

SEQ ID NO: 302 - DNA, 22 bp, Homo sapiens
  source 1..22: mol_type = other DNA
atcttcctgccagaatgggagg

SEQ ID NO: 303 - DNA, 23 bp, Homo sapiens
  source 1..23: mol_type = other DNA
agcacactgcaaagaatgtgtgg

SEQ ID NO: 304 - DNA, 23 bp, Homo sapiens
  source 1..23: mol_type = other DNA
ttaatcctgccaacaatgatgtg

SEQ ID NO: 305 - DNA, 23 bp, Homo sapiens
  source 1..23: mol_type = other DNA
atcattatgctaagaatgaggag

SEQ ID NO: 306 - DNA, 23 bp, Homo sapiens
  source 1..23: mol_type = other DNA
tccatcctgtcaagaagtgaagg

SEQ ID NO: 307 - DNA, 23 bp, Homo sapiens
  source 1..23: mol_type = other DNA
gccatcttgccaataatgatatg

SEQ ID NO: 308 - DNA, 22 bp, Homo sapiens
  source 1..22: mol_type = other DNA
accatcctcagagaatgagagg

SEQ ID NO: 309 - DNA, 22 bp, Homo sapiens
  source 1..22: mol_type = other DNA
gctatccttcaaaaatgagaga

SEQ ID NO: 310 - DNA, 22 bp, Homo sapiens
  source 1..22: mol_type = other DNA
accatccaaacaagaatggtgg

SEQ ID NO: 311 - DNA, 23 bp, Homo sapiens
  source 1..23: mol_type = other DNA
gccatcctaacaagtgtgaggtt

SEQ ID NO: 312 - DNA, 23 bp, Homo sapiens
  source 1..23: mol_type = other DNA
cccaccctgcgaagaatggacag

SEQ ID NO: 313 - DNA, 22 bp, Homo sapiens
  source 1..22: mol_type = other DNA
gcctacaagccaagaagagggg

SEQ ID NO: 314 - DNA, 22 bp, Homo sapiens
  source 1..22: mol_type = other DNA
gccatccaataagaatgagtgg

SEQ ID NO: 315 - DNA, 22 bp, Homo sapiens
  source 1..22: mol_type = other DNA
gccatcagcaaagaatgagagc

SEQ ID NO: 316 - DNA, 23 bp, Homo sapiens
  source 1..23: mol_type = other DNA
gccatcctaacaggaatgaggtg

SEQ ID NO: 317 - DNA, 23 bp, Homo sapiens
  source 1..23: mol_type = other DNA
tctttactaccaagaatgagtga

SEQ ID NO: 318 - DNA, 22 bp, Homo sapiens
  source 1..22: mol_type = other DNA
gccatccaccaagaaagtggag

SEQ ID NO: 319 - DNA, 22 bp, Homo sapiens
  source 1..22: mol_type = other DNA
cccatctaccaagaatgaacag

SEQ ID NO: 320 - DNA, 22 bp, Homo sapiens
  source 1..22: mol_type = other DNA
gccatccaccaagaaagcgggg

SEQ ID NO: 321 - DNA, 23 bp, Homo sapiens
  source 1..23: mol_type = other DNA
gccatcctgcaagatgtgaggtg

SEQ ID NO: 322 - DNA, 23 bp, Homo sapiens
  source 1..23: mol_type = other DNA
gccatccttcccagaaagagggg

SEQ ID NO: 323 - DNA, 23 bp, Homo sapiens
  source 1..23: mol_type = other DNA
gtctatctgccaagaatgaggag

SEQ ID NO: 324 - DNA, 22 bp, Homo sapiens
  source 1..22: mol_type = other DNA
tcctatctgccaagaatagagg

SEQ ID NO: 325 - DNA, 22 bp, Homo sapiens
  source 1..22: mol_type = other DNA
gcccaccagcaagaatgagttg

SEQ ID NO: 326 - DNA, 21 bp, Homo sapiens
  source 1..21: mol_type = other DNA
gacatcctgaagaatgagaga

SEQ ID NO: 327 - DNA, 21 bp, Homo sapiens
  source 1..21: mol_type = other DNA
gccaccctacagaatgagtga

SEQ ID NO: 328 - DNA, 23 bp, Homo sapiens
  source 1..23: mol_type = other DNA
gccatcctaacaagcatgaggtg

SEQ ID NO: 329 - DNA, 23 bp, Homo sapiens
  source 1..23: mol_type = other DNA
gccaccatgccaaggatgtggtg

SEQ ID NO: 330 - DNA, 21 bp, Homo sapiens
  source 1..21: mol_type = other DNA
gccattctgaagaatgatagg

SEQ ID NO: 331 - DNA, 22 bp, Homo sapiens
  source 1..22: mol_type = other DNA
gccatccaccaagaaagcggag

SEQ ID NO: 332 - DNA, 22 bp, Homo sapiens
  source 1..22: mol_type = other DNA
cacatccagccaagattagtgg

SEQ ID NO: 333 - DNA, 22 bp, Homo sapiens
  source 1..22: mol_type = other DNA
gccatcattaaagaatgaatgg

SEQ ID NO: 334 - DNA, 21 bp, Homo sapiens
  source 1..21: mol_type = other DNA
tccatcctaccaagagcgtgg

SEQ ID NO: 335 - DNA, 22 bp, Homo sapiens
  source 1..22: mol_type = other DNA
atgatcctgccaagaaaagagg

SEQ ID NO: 336 - DNA, 21 bp, Homo sapiens
  source 1..21: mol_type = other DNA
tccatcctgccaaatgagtaa

SEQ ID NO: 337 - DNA, 23 bp, Homo sapiens
  source 1..23: mol_type = other DNA
gctatcctgccaagggcaagtgg

SEQ ID NO: 338 - DNA, 23 bp, Homo sapiens
  source 1..23: mol_type = other DNA
gccatcctgcctaatgggagggg

SEQ ID NO: 339 - DNA, 23 bp, Homo sapiens
  source 1..23: mol_type = other DNA
tccatcctgcaaagaacaagggg

SEQ ID NO: 340 - DNA, 22 bp, Homo sapiens
  source 1..22: mol_type = other DNA
gcccactgacaagaatgagcag

SEQ ID NO: 341 - DNA, 23 bp, Homo sapiens
  source 1..23: mol_type = other DNA
gccattctgacaagcatgagatg

SEQ ID NO: 342 - DNA, 23 bp, Homo sapiens
  source 1..23: mol_type = other DNA
gccattctgacaagagtgaggga

SEQ ID NO: 343 - DNA, 23 bp, Homo sapiens
  source 1..23: mol_type = other DNA
gccatcctgacaagtgtgaggta

SEQ ID NO: 344 - DNA, 22 bp, Homo sapiens
  source 1..22: mol_type = other DNA
gccatctgcaaggaatgatggg

SEQ ID NO: 345 - DNA, 22 bp, Homo sapiens
  source 1..22: mol_type = other DNA
gcctcctaccaagaaagaggca

SEQ ID NO: 346 - DNA, 23 bp, Homo sapiens
  source 1..23: mol_type = other DNA
gatattatgctaaggatgagggg

SEQ ID NO: 347 - DNA, 21 bp, Homo sapiens
  source 1..21: mol_type = other DNA
gccattgccaagaataagagt

SEQ ID NO: 348 - DNA, 21 bp, Homo sapiens
  source 1..21: mol_type = other DNA
tccatcttaaagaatgagtgg

SEQ ID NO: 349 - DNA, 22 bp, Homo sapiens
  source 1..22: mol_type = other DNA
gtctactgcaaagaatgtgggg

SEQ ID NO: 350 - DNA, 23 bp, Homo sapiens
  source 1..23: mol_type = other DNA
ccatgcctgccaaggatgagtgg

SEQ ID NO: 351 - DNA, 23 bp, Homo sapiens
  source 1..23: mol_type = other DNA
taaatcctgtcaagaatgagata

SEQ ID NO: 352 - DNA, 22 bp, Homo sapiens
  source 1..22: mol_type = other DNA
accatcattcaagaatgagggt

SEQ ID NO: 353 - DNA, 23 bp, Homo sapiens
  source 1..23: mol_type = other DNA
gccatcctgacagatatgaggtg

SEQ ID NO: 354 - DNA, 21 bp, Homo sapiens
  source 1..21: mol_type = other DNA
gccatttccatgaatgagtga

SEQ ID NO: 355 - DNA, 22 bp, Homo sapiens
  source 1..22: mol_type = other DNA
gccacactgccaagaagagctg

SEQ ID NO: 356 - DNA, 23 bp, Homo sapiens
  source 1..23: mol_type = other DNA
cctatcctgccaagaattactgc

SEQ ID NO: 357 - DNA, 23 bp, Homo sapiens
  source 1..23: mol_type = other DNA
cacttcctaccaagaaagagtga

SEQ ID NO: 358 - DNA, 23 bp, Homo sapiens
  source 1..23: mol_type = other DNA
tgctgcctgacaaggatgagtgg

SEQ ID NO: 359 - DNA, 23 bp, Homo sapiens
  source 1..23: mol_type = other DNA
gccattcttgcaagagtgaggtg

SEQ ID NO: 360 - DNA, 23 bp, Homo sapiens
  source 1..23: mol_type = other DNA
cccatcttgacaagaatgaaaag

SEQ ID NO: 361 - DNA, 23 bp, Homo sapiens
  source 1..23: mol_type = other DNA
tccatgctgccaagaagaggggt

SEQ ID NO: 362 - DNA, 22 bp, Homo sapiens
  source 1..22: mol_type = other DNA
tctatctgccaaggataagggg

SEQ ID NO: 363 - DNA, 22 bp, Homo sapiens
  source 1..22: mol_type = other DNA
gccatcttgctagaatgagagg

SEQ ID NO: 364 - DNA, 21 bp, Homo sapiens
  source 1..21: mol_type = other DNA
atcatcctgaagaatgaaagg

SEQ ID NO: 365 - DNA, 21 bp, Homo sapiens
  source 1..21: mol_type = other DNA
gccaacctacagaatgaggga

SEQ ID NO: 366 - DNA, 23 bp, Homo sapiens
  source 1..23: mol_type = other DNA
accctcctaccaagaatgaatta

SEQ ID NO: 367 - DNA, 22 bp, Homo sapiens
  source 1..22: mol_type = other DNA
gccatcagcaaagagtgagaag

SEQ ID NO: 368 - DNA, 22 bp, Homo sapiens
  source 1..22: mol_type = other DNA
gccacctgccaagaagcagggc

SEQ ID NO: 369 - DNA, 22 bp, Homo sapiens
  source 1..22: mol_type = other DNA
gccattcaccgagaatgaaggg

SEQ ID NO: 370 - DNA, 22 bp, Homo sapiens
  source 1..22: mol_type = other DNA
gccatccttccagaatggagga

SEQ ID NO: 371 - DNA, 23 bp, Homo sapiens
  source 1..23: mol_type = other DNA
cccatcctgccaagatatagaga

SEQ ID NO: 372 - DNA, 22 bp, Homo sapiens
  source 1..22: mol_type = other DNA
tctatctgccaagagtaagggg

SEQ ID NO: 373 - DNA, 22 bp, Homo sapiens
  source 1..22: mol_type = other DNA
tccatcatggcaagaagagagg

SEQ ID NO: 374 - DNA, 23 bp, Homo sapiens
  source 1..23: mol_type = other DNA
gccatcctaccttgaataaatgg

SEQ ID NO: 375 - DNA, 23 bp, Homo sapiens
  source 1..23: mol_type = other DNA
tgcatattgccaacaataagggg

SEQ ID NO: 376 - DNA, 23 bp, Homo sapiens
  source 1..23: mol_type = other DNA
gccatcctgccaagacactggaa

SEQ ID NO: 377 - DNA, 22 bp, Homo sapiens
  source 1..22: mol_type = other DNA
gccatttgccaagaaagagtag

SEQ ID NO: 378 - DNA, 24 bp, Homo sapiens
  source 1..24: mol_type = other DNA
gccatacctgccatgaatgaggaa

SEQ ID NO: 379 - DNA, 22 bp, Homo sapiens
  source 1..22: mol_type = other DNA
gccatcaagcaagaatgaggga

SEQ ID NO: 380 - DNA, 23 bp, Homo sapiens
  source 1..23: mol_type = other DNA
gccatccttgcaagagtgaggtg

SEQ ID NO: 381 - DNA, 23 bp, Homo sapiens
  source 1..23: mol_type = other DNA
gtcatcctgccaaaataaggagg

SEQ ID NO: 382 - DNA, 22 bp, Homo sapiens
  source 1..22: mol_type = other DNA
gccatcagccaagaatggggat

SEQ ID NO: 383 - DNA, 23 bp, Homo sapiens
  source 1..23: mol_type = other DNA
aacatcctaccaagaataagggt

SEQ ID NO: 384 - DNA, 24 bp, Homo sapiens
  source 1..24: mol_type = other DNA
gccatctctgccaagagtcagggg

SEQ ID NO: 385 - DNA, 22 bp, Homo sapiens
  source 1..22: mol_type = other DNA
gccatccttcaagaatgacagc

SEQ ID NO: 386 - DNA, 23 bp, Homo sapiens
  source 1..23: mol_type = other DNA
tatgtcctaccaagcatgagagg

SEQ ID NO: 387 - DNA, 23 bp, Homo sapiens
  source 1..23: mol_type = other DNA
ccatgcctgacaagaatgaggag

SEQ ID NO: 388 - DNA, 21 bp, Homo sapiens
  source 1..21: mol_type = other DNA
gccatctccaaaaatgtgagg

SEQ ID NO: 389 - DNA, 23 bp, Homo sapiens
  source 1..23: mol_type = other DNA
gccatactgccatgaataacagg

SEQ ID NO: 390 - DNA, 22 bp, Homo sapiens
  source 1..22: mol_type = other DNA
gccatcctatgagaatgagcag

SEQ ID NO: 391 - DNA, 21 bp, Homo sapiens
  source 1..21: mol_type = other DNA
gccaccctgaagagtgagggg

SEQ ID NO: 392 - DNA, 21 bp, Homo sapiens
  source 1..21: mol_type = other DNA
tccatcttgccaaatgatggg

SEQ ID NO: 393 - DNA, 22 bp, Homo sapiens
  source 1..22: mol_type = other DNA
ggcctctaccaaggatgagggg

SEQ ID NO: 394 - DNA, 23 bp, Homo sapiens
  source 1..23: mol_type = other DNA
gccactccagcaagaatgagtgg

SEQ ID NO: 395 - DNA, 23 bp, Homo sapiens
  source 1..23: mol_type = other DNA
gccatcctgacaagaatgcagac

SEQ ID NO: 396 - DNA, 23 bp, Homo sapiens
  source 1..23: mol_type = other DNA
cctcacctgacaagaatgaggtg

SEQ ID NO: 397 - DNA, 23 bp, Homo sapiens
  source 1..23: mol_type = other DNA
tcctgcataccaagaatgagttg

SEQ ID NO: 398 - DNA, 23 bp, Homo sapiens
  source 1..23: mol_type = other DNA
gccatcctgctgagtatgaagtg

SEQ ID NO: 399 - DNA, 23 bp, Homo sapiens
  source 1..23: mol_type = other DNA
gccatcctaacaagtataaggtg

SEQ ID NO: 400 - DNA, 23 bp, Homo sapiens
  source 1..23: mol_type = other DNA
ctctcactgacaagaatgagggg

SEQ ID NO: 401 - DNA, 23 bp, Homo sapiens
  source 1..23: mol_type = other DNA
acactcctacaaagaatgagaga

SEQ ID NO: 402 - DNA, 23 bp, Homo sapiens
  source 1..23: mol_type = other DNA
gtaatgataccaaggatgagagg

SEQ ID NO: 403 - DNA, 22 bp, Homo sapiens
  source 1..22: mol_type = other DNA
gccataccactagaatgagcgg

SEQ ID NO: 404 - DNA, 23 bp, Homo sapiens
  source 1..23: mol_type = other DNA
ccgtccatgccatgaatgagtgg

SEQ ID NO: 405 - DNA, 22 bp, Homo sapiens
  source 1..22: mol_type = other DNA
ggcatcctggaagaatgggtgg

SEQ ID NO: 406 - DNA, 22 bp, Homo sapiens
  source 1..22: mol_type = other DNA
accatcagccaataaagagtgg

SEQ ID NO: 407 - DNA, 23 bp, Homo sapiens
  source 1..23: mol_type = other DNA
agtaatctgccaagaatgagtga

SEQ ID NO: 408 - DNA, 22 bp, Homo sapiens
  source 1..22: mol_type = other DNA
gccaagtgccaaggatgaaagg

SEQ ID NO: 409 - DNA, 22 bp, Homo sapiens
  source 1..22: mol_type = other DNA
cacaccctgccaaagtgagagg

SEQ ID NO: 410 - DNA, 22 bp, Homo sapiens
  source 1..22: mol_type = other DNA
gccatatgcaaagaatgagaaa

SEQ ID NO: 411 - DNA, 23 bp, Homo sapiens
  source 1..23: mol_type = other DNA
gccaccctgcccagaatagaagg

SEQ ID NO: 412 - DNA, 23 bp, Homo sapiens
  source 1..23: mol_type = other DNA
accaacctgccaagagtgtggga

SEQ ID NO: 413 - DNA, 22 bp, Homo sapiens
  source 1..22: mol_type = other DNA
aagatcctgccagaatcagtgg

SEQ ID NO: 414 - DNA, 21 bp, Homo sapiens
  source 1..21: mol_type = other DNA
gtcactgccaagaatgagaaa

SEQ ID NO: 415 - DNA, 22 bp, Homo sapiens
  source 1..22: mol_type = other DNA
cccttccagccaaaatgagggg

SEQ ID NO: 416 - DNA, 23 bp, Homo sapiens
  source 1..23: mol_type = other DNA
tcagtagtgccaagaatgagaga

SEQ ID NO: 417 - DNA, 23 bp, Homo sapiens
  source 1..23: mol_type = other DNA
accatccatccaacaatgaggtg

SEQ ID NO: 418 - DNA, 22 bp, Homo sapiens
  source 1..22: mol_type = other DNA
ctcaacatgccagaatgagcgg

SEQ ID NO: 419 - DNA, 22 bp, Homo sapiens
  source 1..22: mol_type = other DNA
aacacccagccaagatgagagg

SEQ ID NO: 420 - DNA, 22 bp, Homo sapiens
  source 1..22: mol_type = other DNA
gccatcagccaaaagtgagaag

SEQ ID NO: 421 - DNA, 23 bp, Homo sapiens
  source 1..23: mol_type = other DNA
ggcatcctgccaggaatcagctg

SEQ ID NO: 422 - DNA, 23 bp, Homo sapiens
  source 1..23: mol_type = other DNA
gggacactgccattaatgagtgg

SEQ ID NO: 423 - DNA, 23 bp, Homo sapiens
  source 1..23: mol_type = other DNA
gccatcccaaaaagaatgaaatg

SEQ ID NO: 424 - DNA, 23 bp, Homo sapiens
  source 1..23: mol_type = other DNA
tccatcctgccaataattggttc

SEQ ID NO: 425 - DNA, 23 bp, Homo sapiens
  source 1..23: mol_type = other DNA
ggcatcttagcaaggatgagaag

SEQ ID NO: 426 - DNA, 24 bp, Homo sapiens
  source 1..24: mol_type = other DNA
gtcatcacttccaagagtgagcag

SEQ ID NO: 427 - DNA, 22 bp, Homo sapiens
  source 1..22: mol_type = other DNA
accatctttcaagaatgaatgg

SEQ ID NO: 428 - DNA, 23 bp, Homo sapiens
  source 1..23: mol_type = other DNA
cccctcctaccaagaaagaggca

SEQ ID NO: 429 - DNA, 23 bp, Homo sapiens
  source 1..23: mol_type = other DNA
gccattctgccaagaactgggtg

SEQ ID NO: 430 - DNA, 22 bp, Homo sapiens
  source 1..22: mol_type = other DNA
gccagcttgccaaaatgagcct

SEQ ID NO: 431 - DNA, 23 bp, Homo sapiens
  source 1..23: mol_type = other DNA
tccatcctgtcaagactgaggtc

SEQ ID NO: 432 - DNA, 23 bp, Homo sapiens
  source 1..23: mol_type = other DNA
accatcctttcatgaatgatggc

SEQ ID NO: 433 - DNA, 22 bp, Homo sapiens
  source 1..22: mol_type = other DNA
gccatcctcccaaatagatggg

SEQ ID NO: 434 - DNA, 23 bp, Homo sapiens
  source 1..23: mol_type = other DNA
gccatcctgacaggaatgaggtg

SEQ ID NO: 435 - DNA, 23 bp, Homo sapiens
  source 1..23: mol_type = other DNA
ggccatctgccaagaaggatggg

SEQ ID NO: 436 - DNA, 22 bp, Homo sapiens
  source 1..22: mol_type = other DNA
gccatgtgccaagaataacggc

SEQ ID NO: 437 - DNA, 23 bp, Homo sapiens
  source 1..23: mol_type = other DNA
ttcatcctaccaagaataggagt

SEQ ID NO: 438 - DNA, 23 bp, Homo sapiens
  source 1..23: mol_type = other DNA
acaatactgccaagaataatagg

SEQ ID NO: 439 - DNA, 22 bp, Homo sapiens
  source 1..22: mol_type = other DNA
tccatcagccaagaatgaaagc

SEQ ID NO: 440 - DNA, 22 bp, Homo sapiens
  source 1..22: mol_type = other DNA
ctcatcctgccaagaagagaga

SEQ ID NO: 441 - DNA, 23 bp, Homo sapiens
  source 1..23: mol_type = other DNA
tacaacctaccaagaatgaatag

SEQ ID NO: 442 - DNA, 21 bp, Homo sapiens
  source 1..21: mol_type = other DNA
gccatcctacaaaatgaatgg

SEQ ID NO: 443 - DNA, 23 bp, Homo sapiens
  source 1..23: mol_type = other DNA
cccatacagccaagaatgagaaa

SEQ ID NO: 444 - DNA, 22 bp, Homo sapiens
  source 1..22: mol_type = other DNA
gctatccttcaagaatgaagga

SEQ ID NO: 445 - DNA, 23 bp, Homo sapiens
  source 1..23: mol_type = other DNA
aacaccctactaagaatgagcag

SEQ ID NO: 446 - DNA, 21 bp, Homo sapiens
  source 1..21: mol_type = other DNA
gccattgcaaagaatgagaaa

SEQ ID NO: 447 - DNA, 22 bp, Homo sapiens
  source 1..22: mol_type = other DNA
gccatcagccgaaaatgagagg

SEQ ID NO: 448 - DNA, 23 bp, Homo sapiens
  source 1..23: mol_type = other DNA
gtgttcctaccaggaatgaatgg

SEQ ID NO: 449 - DNA, 22 bp, Homo sapiens
  source 1..22: mol_type = other DNA
gccatccctcaagagtgagtga

SEQ ID NO: 450 - DNA, 23 bp, Homo sapiens
  source 1..23: mol_type = other DNA
gggatcctgccaacaatgagagg

SEQ ID NO: 451 - DNA, 22 bp, Homo sapiens
  source 1..22: mol_type = other DNA
gccaatctgtaagaatgaggga

SEQ ID NO: 452 - DNA, 23 bp, Homo sapiens
  source 1..23: mol_type = other DNA
gcctcactgccaagaatgacagg

SEQ ID NO: 453 - DNA, 23 bp, Homo sapiens
  source 1..23: mol_type = other DNA
gccagtctaccaaggatgagcag

SEQ ID NO: 454 - DNA, 23 bp, Homo sapiens
  source 1..23: mol_type = other DNA
gccatcctgaaaagaatgagaca

SEQ ID NO: 455 - DNA, 22 bp, Homo sapiens
  source 1..22: mol_type = other DNA
cccatcctaccaggatgaggga

SEQ ID NO: 456 - DNA, 22 bp, Homo sapiens
  source 1..22: mol_type = other DNA
gccatctgcctagaatgaaagt

SEQ ID NO: 457 - DNA, 22 bp, Homo sapiens
  source 1..22: mol_type = other DNA
gccatttgccaagaataagagg

SEQ ID NO: 458 - DNA, 23 bp, Homo sapiens
  source 1..23: mol_type = other DNA
gccatcctaacagatatgagtgg

SEQ ID NO: 459 - DNA, 23 bp, Homo sapiens
  source 1..23: mol_type = other DNA
tatatcctgccatgaacaagagg

SEQ ID NO: 460 - DNA, 21 bp, Homo sapiens
  source 1..21: mol_type = other DNA
gtcattaccaagaatgaatgg

SEQ ID NO: 461 - DNA, 23 bp, Homo sapiens
  source 1..23: mol_type = other DNA
gccattcttgcaagaatgaggtg

SEQ ID NO: 462 - DNA, 23 bp, Homo sapiens
  source 1..23: mol_type = other DNA
gccatccttgcaataatgagtga

SEQ ID NO: 463 - DNA, 24 bp, Homo sapiens
  source 1..24: mol_type = other DNA
ggcatccagccaaagaatgagcag

SEQ ID NO: 464 - DNA, 23 bp, Homo sapiens
  source 1..23: mol_type = other DNA
gccatgcctgcaagcatgagtgg

SEQ ID NO: 465 - DNA, 23 bp, Homo sapiens
  source 1..23: mol_type = other DNA
tacagtctacaaagaatgagagg

SEQ ID NO: 466 - DNA, 23 bp, Homo sapiens
  source 1..23: mol_type = other DNA
gccatcctccctagaatgagaat

SEQ ID NO: 467 - DNA, 22 bp, Homo sapiens
  source 1..22: mol_type = other DNA
gccatccttcaacaatgaggaa

SEQ ID NO: 468 - DNA, 23 bp, Homo sapiens
  source 1..23: mol_type = other DNA
gccatatattcaagaatgagaga

SEQ ID NO: 469 - DNA, 22 bp, Homo sapiens
  source 1..22: mol_type = other DNA
accatctgcaaggaatgagaga

SEQ ID NO: 470 - DNA, 23 bp, Homo sapiens
  source 1..23: mol_type = other DNA
gtcatactgctaagaataatagg

SEQ ID NO: 471 - DNA, 22 bp, Homo sapiens
  source 1..22: mol_type = other DNA
gccatcaatcaacaatgagtgg

SEQ ID NO: 472 - DNA, 22 bp, Homo sapiens
  source 1..22: mol_type = other DNA
gctatctactaagaatgaaagg

SEQ ID NO: 473 - DNA, 24 bp, Homo sapiens
  source 1..24: mol_type = other DNA
cctatgcctgccaaggatgagtag

SEQ ID NO: 474 - DNA, 23 bp, Homo sapiens
  source 1..23: mol_type = other DNA
tccatgatgccatgaatgacagg

SEQ ID NO: 475 - DNA, 22 bp, Homo sapiens
  source 1..22: mol_type = other DNA
tccatctgtaaagaatgagagg

SEQ ID NO: 476 - DNA, 23 bp, Homo sapiens
  source 1..23: mol_type = other DNA
caagtgcagccaagaatgagggg

SEQ ID NO: 477 - DNA, 23 bp, Homo sapiens
  source 1..23: mol_type = other DNA
tcaataatgccaagaatgagaaa

SEQ ID NO: 478 - DNA, 21 bp, Homo sapiens
  source 1..21: mol_type = other DNA
gccactgccgagaatgaggaa

SEQ ID NO: 479 - DNA, 23 bp, Homo sapiens
  source 1..23: mol_type = other DNA
accattctgacaagcatgagatg

SEQ ID NO: 480 - DNA, 23 bp, Homo sapiens
  source 1..23: mol_type = other DNA
gtagacctgccaagtatgtgagg

SEQ ID NO: 481 - DNA, 24 bp, Homo sapiens
  source 1..24: mol_type = other DNA
gccatttgagccaagtatgagggg

SEQ ID NO: 482 - DNA, 22 bp, Homo sapiens
  source 1..22: mol_type = other DNA
tccatcctgccaaagatagttg

SEQ ID NO: 483 - DNA, 22 bp, Homo sapiens
  source 1..22: mol_type = other DNA
gcctcctaccaagaatgtatga

SEQ ID NO: 484 - DNA, 23 bp, Homo sapiens
  source 1..23: mol_type = other DNA
gccatcttgccaggattaagagg

SEQ ID NO: 485 - DNA, 24 bp, Homo sapiens
  source 1..24: mol_type = other DNA
accatcctgccaggtatagtgagg

SEQ ID NO: 486 - DNA, 23 bp, Homo sapiens
  source 1..23: mol_type = other DNA
gccatcctaacaagtgtgaggta

SEQ ID NO: 487 - DNA, 23 bp, Homo sapiens
  source 1..23: mol_type = other DNA
tacatcctgcccagaattaagag

SEQ ID NO: 488 - DNA, 23 bp, Homo sapiens
  source 1..23: mol_type = other DNA
tccatcctgccaagattctggag

SEQ ID NO: 489 - DNA, 22 bp, Homo sapiens
  source 1..22: mol_type = other DNA
gctatccagcaagaatggcggg

SEQ ID NO: 490 - DNA, 23 bp, Homo sapiens
  source 1..23: mol_type = other DNA
tccatcctactaagaatgaggag

SEQ ID NO: 491 - DNA, 23 bp, Homo sapiens
  source 1..23: mol_type = other DNA
gccatcctcacaagtatgagtgg

SEQ ID NO: 492 - DNA, 23 bp, Homo sapiens
  source 1..23: mol_type = other DNA
ccgatcctgcccagaatgagcgg

SEQ ID NO: 493 - DNA, 21 bp, Homo sapiens
  source 1..21: mol_type = other DNA
gccatcctaatgaatgtgtgg

SEQ ID NO: 494 - DNA, 22 bp, Homo sapiens
  source 1..22: mol_type = other DNA
gccatcctggaaggatgggtgg

SEQ ID NO: 495 - DNA, 22 bp, Homo sapiens
  source 1..22: mol_type = other DNA
gccatctcccaagaatgagagc

SEQ ID NO: 496 - DNA, 23 bp, Homo sapiens
  source 1..23: mol_type = other DNA
gccatccttcaaaggatgaagtg

SEQ ID NO: 497 - DNA, 23 bp, Homo sapiens
  source 1..23: mol_type = other DNA
ggccttatgccaagaatgatgag

SEQ ID NO: 498 - DNA, 23 bp, Homo sapiens
  source 1..23: mol_type = other DNA
gccatccttccaagtgtgaggag

SEQ ID NO: 499 - DNA, 23 bp, Homo sapiens
  source 1..23: mol_type = other DNA
ggccacccgcctagaatgaatgg

SEQ ID NO: 500 - DNA, 21 bp, Homo sapiens
  source 1..21: mol_type = other DNA
tccatactgccaaatgaaagg

SEQ ID NO: 501 - DNA, 21 bp, Homo sapiens
  source 1..21: mol_type = other DNA
gccatccccaagaaggagaga

SEQ ID NO: 502 - DNA, 23 bp, Homo sapiens
  source 1..23: mol_type = other DNA
actgtactgcctagaatgagggg

SEQ ID NO: 503 - DNA, 22 bp, Homo sapiens
  source 1..22: mol_type = other DNA
accatcttgcaagaatgtttgg

SEQ ID NO: 504 - DNA, 23 bp, Homo sapiens
  source 1..23: mol_type = other DNA
gccatcctgacaggaataaggcg

SEQ ID NO: 505 - DNA, 22 bp, Homo sapiens
  source 1..22: mol_type = other DNA
gacatctgccaacaatgtgagg

SEQ ID NO: 506 - DNA, 22 bp, Homo sapiens
  source 1..22: mol_type = other DNA
gccatcctgtaagtgtgagtgg

SEQ ID NO: 507 - DNA, 23 bp, Homo sapiens
  source 1..23: mol_type = other DNA
ccgatcctgcccaggatgagcgg

SEQ ID NO: 508 - DNA, 23 bp, Homo sapiens
  source 1..23: mol_type = other DNA
taaatcctgccaagaatttctgg

SEQ ID NO: 509 - DNA, 23 bp, Homo sapiens
  source 1..23: mol_type = other DNA
aacatactgccatgaatgtgggg

SEQ ID NO: 510 - DNA, 23 bp, Homo sapiens
  source 1..23: mol_type = other DNA
accatcctgcaaggtatgtgggg

SEQ ID NO: 511 - DNA, 24 bp, Homo sapiens
  source 1..24: mol_type = other DNA
gccaccactgccatcaatgagggg

SEQ ID NO: 512 - DNA, 23 bp, Homo sapiens
  source 1..23: mol_type = other DNA
gccatctttgtaagaatgtgagg

SEQ ID NO: 513 - DNA, 22 bp, Homo sapiens
  source 1..22: mol_type = other DNA
gaccccctaccaagaagagagg

SEQ ID NO: 514 - DNA, 22 bp, Homo sapiens
  source 1..22: mol_type = other DNA
ggccacctgccaagatgaaggg

SEQ ID NO: 515 - DNA, 21 bp, Homo sapiens
  source 1..21: mol_type = other DNA
gacatcctgaagaatgaaatg

SEQ ID NO: 516 - DNA, 23 bp, Homo sapiens
  source 1..23: mol_type = other DNA
accttcctgacaagaatgagggg

SEQ ID NO: 517 - DNA, 23 bp, Homo sapiens
  source 1..23: mol_type = other DNA
gccatcattttaagaatgagatg

SEQ ID NO: 518 - DNA, 21 bp, Homo sapiens
  source 1..21: mol_type = other DNA
gccatccagccaggtgagatg

SEQ ID NO: 519 - DNA, 23 bp, Homo sapiens
  source 1..23: mol_type = other DNA
agattcctgccaagaatgatgag

SEQ ID NO: 520 - DNA, 23 bp, Homo sapiens
  source 1..23: mol_type = other DNA
cccatcctgcccagcatgagggg

SEQ ID NO: 521 - DNA, 23 bp, Homo sapiens
  source 1..23: mol_type = other DNA
tgctaactgccaagaatgagggc

SEQ ID NO: 522 - DNA, 23 bp, Homo sapiens
  source 1..23: mol_type = other DNA
ttcatccttccatgaatgaaagg

SEQ ID NO: 523 - DNA, 23 bp, Homo sapiens
  source 1..23: mol_type = other DNA
cccatcctgccaggaatttgaga

SEQ ID NO: 524 - DNA, 23 bp, Homo sapiens
  source 1..23: mol_type = other DNA
cacaacctcccaaggatgagtgg

SEQ ID NO: 525 - DNA, 23 bp, Homo sapiens
  source 1..23: mol_type = other DNA
cacaccctgcgaagaataaggag

SEQ ID NO: 526 - DNA, 23 bp, Homo sapiens
  source 1..23: mol_type = other DNA
ctcatcctaccaagaagtaggga

SEQ ID NO: 527 - DNA, 23 bp, Homo sapiens
  source 1..23: mol_type = other DNA
accatcctgagagaaatgaggtg

SEQ ID NO: 528 - DNA, 23 bp, Homo sapiens
  source 1..23: mol_type = other DNA
gccatcctgccaggatggtagga

SEQ ID NO: 529 - DNA, 22 bp, Homo sapiens
  source 1..22: mol_type = other DNA
gccatcggccaagaatgttgag

SEQ ID NO: 530 - DNA, 23 bp, Homo sapiens
  source 1..23: mol_type = other DNA
gatatactgccaagaagatgagg

SEQ ID NO: 531 - DNA, 23 bp, Homo sapiens
  source 1..23: mol_type = other DNA
tacatcatgctaagaatgaggga

SEQ ID NO: 532 - DNA, 22 bp, Homo sapiens
  source 1..22: mol_type = other DNA
gaaatccagccagaatgaatgg

SEQ ID NO: 533 - DNA, 23 bp, Homo sapiens
  source 1..23: mol_type = other DNA
gccagcatgcaaagaatgagggg

SEQ ID NO: 534 - DNA, 23 bp, Homo sapiens
  source 1..23: mol_type = other DNA
gccatcccaccatgaagaaggag

SEQ ID NO: 535 - DNA, 23 bp, Homo sapiens
  source 1..23: mol_type = other DNA
gccatcctggcagtaatgagtga

SEQ ID NO: 536 - DNA, 22 bp, Homo sapiens
  source 1..22: mol_type = other DNA
gtcatcccccaaaaatgagggg

SEQ ID NO: 537 - DNA, 23 bp, Homo sapiens
  source 1..23: mol_type = other DNA
cccaacctgtcaagaatgaacat

SEQ ID NO: 538 - DNA, 23 bp, Homo sapiens
  source 1..23: mol_type = other DNA
accatcccagcaagtatgaggtg

SEQ ID NO: 539 - DNA, 23 bp, Homo sapiens
  source 1..23: mol_type = other DNA
gagaacatgctaagaatgagcag

SEQ ID NO: 540 - DNA, 23 bp, Homo sapiens
  source 1..23: mol_type = other DNA
gccatcctgtgaagtatgaggtg

SEQ ID NO: 541 - DNA, 23 bp, Homo sapiens
  source 1..23: mol_type = other DNA
gcatttatgccaggaatgtgagg

SEQ ID NO: 542 - DNA, 23 bp, Homo sapiens
  source 1..23: mol_type = other DNA
gccatcctagcaggcatgacttg

SEQ ID NO: 543 - DNA, 23 bp, Homo sapiens
  source 1..23: mol_type = other DNA
tgcatcttgccatgaatgaagag

SEQ ID NO: 544 - DNA, 23 bp, Homo sapiens
  source 1..23: mol_type = other DNA
gccattctaacaagaatggggtg

SEQ ID NO: 545 - DNA, 22 bp, Homo sapiens
  source 1..22: mol_type = other DNA
cccaccctgcaaagaagagggg

SEQ ID NO: 546 - DNA, 23 bp, Homo sapiens
  source 1..23: mol_type = other DNA
gagagcctgccctgaatgagggg

SEQ ID NO: 547 - DNA, 23 bp, Homo sapiens
  source 1..23: mol_type = other DNA
gacatcctgccaagaagcagaca

SEQ ID NO: 548 - DNA, 23 bp, Homo sapiens
  source 1..23: mol_type = other DNA
tccatagagacaagaatgaaagg

SEQ ID NO: 549 - DNA, 23 bp, Homo sapiens
  source 1..23: mol_type = other DNA
gtcatactgccaagaataaatca

SEQ ID NO: 550 - DNA, 21 bp, Homo sapiens
  source 1..21: mol_type = other DNA
gccattctgccaggtgagtag

SEQ ID NO: 551 - DNA, 23 bp, Homo sapiens
  source 1..23: mol_type = other DNA
aataacctgccacgaataagtgg

SEQ ID NO: 552 - DNA, 23 bp, Homo sapiens
  source 1..23: mol_type = other DNA
gcattcctaccaacaatgaatga

SEQ ID NO: 553 - DNA, 22 bp, Homo sapiens
  source 1..22: mol_type = other DNA
gccaccctgcaagaagatgcgg

SEQ ID NO: 554 - DNA, 23 bp, Homo sapiens
  source 1..23: mol_type = other DNA
tgcatcctgacaagaaatagtgg

SEQ ID NO: 555 - DNA, 23 bp, Homo sapiens
  source 1..23: mol_type = other DNA
actatactgcaaagaatgagaag

SEQ ID NO: 556 - DNA, 23 bp, Homo sapiens
  source 1..23: mol_type = other DNA
tcccatcagccaagaatgagagg

SEQ ID NO: 557 - DNA, 22 bp, Homo sapiens
  source 1..22: mol_type = other DNA
atcatccaccaagagtgagggg

SEQ ID NO: 558 - DNA, 23 bp, Homo sapiens
  source 1..23: mol_type = other DNA
gtattcctgccaagaaagaggag

SEQ ID NO: 559 - DNA, 23 bp, Homo sapiens
  source 1..23: mol_type = other DNA
tccatcctgttaagaaggagagg

SEQ ID NO: 560 - DNA, 23 bp, Homo sapiens
  source 1..23: mol_type = other DNA
attttactgccaagaatgagaga

SEQ ID NO: 561 - DNA, 22 bp, Homo sapiens
  source 1..22: mol_type = other DNA
gccatcttgcaggaatgagtga

SEQ ID NO: 562 - DNA, 23 bp, Homo sapiens
  source 1..23: mol_type = other DNA
gctatactgccaagagtatgggg

SEQ ID NO: 563 - DNA, 24 bp, Homo sapiens
  source 1..24: mol_type = other DNA
accatcatagccaagaatgaaaag

SEQ ID NO: 564 - DNA, 22 bp, Homo sapiens
  source 1..22: mol_type = other DNA
tacatctgtcaagaatgtgtgg

SEQ ID NO: 565 - DNA, 22 bp, Homo sapiens
  source 1..22: mol_type = other DNA
gctatccttcaagaatgaaggg

SEQ ID NO: 566 - DNA, 22 bp, Homo sapiens
  source 1..22: mol_type = other DNA
gccatctgagaagaatgaatgg

SEQ ID NO: 567 - DNA, 23 bp, Homo sapiens
  source 1..23: mol_type = other DNA
gtgatcctgcaaagaatgactgg

SEQ ID NO: 568 - DNA, 22 bp, Homo sapiens
  source 1..22: mol_type = other DNA
gccatgagccaagagtgaggag

SEQ ID NO: 569 - DNA, 23 bp, Homo sapiens
  source 1..23: mol_type = other DNA
gccatcctgactagtatgagatg

SEQ ID NO: 570 - DNA, 23 bp, Homo sapiens
  source 1..23: mol_type = other DNA
tccatcctgccatgaaagagggt

SEQ ID NO: 571 - DNA, 22 bp, Homo sapiens
  source 1..22: mol_type = other DNA
gccagcctgcaagaataacagg

SEQ ID NO: 572 - DNA, 23 bp, Homo sapiens
  source 1..23: mol_type = other DNA
tgtatcctgccaagaaggagatc

SEQ ID NO: 573 - DNA, 22 bp, Homo sapiens
  source 1..22: mol_type = other DNA
gccatagagccaagaagagtgg

SEQ ID NO: 574 - DNA, 23 bp, Homo sapiens
  source 1..23: mol_type = other DNA
tccatcatgccaagaaataaatg

SEQ ID NO: 575 - DNA, 23 bp, Homo sapiens
  source 1..23: mol_type = other DNA
accatcataccaagaatgagcat

SEQ ID NO: 576 - DNA, 21 bp, Homo sapiens
  source 1..21: mol_type = other DNA
ggcactgacaagaatgagaag

SEQ ID NO: 577 - DNA, 22 bp, Homo sapiens
  source 1..22: mol_type = other DNA
gatatccagccaagaagagtga

SEQ ID NO: 578 - DNA, 23 bp, Homo sapiens
  source 1..23: mol_type = other DNA
gtcatccagccaagaagtggtgt

SEQ ID NO: 579 - DNA, 23 bp, Homo sapiens
  source 1..23: mol_type = other DNA
gccatcctgacaggtatgggtgg

SEQ ID NO: 580 - DNA, 23 bp, Homo sapiens
  source 1..23: mol_type = other DNA
gctcatcagcaaagaatgagagg

SEQ ID NO: 581 - DNA, 21 bp, Homo sapiens
  source 1..21: mol_type = other DNA
gccattaccacgaatgagatg

SEQ ID NO: 582 - DNA, 23 bp, Homo sapiens
  source 1..23: mol_type = other DNA
gccatcctgacagatgtgaggtg

SEQ ID NO: 583 - DNA, 22 bp, Homo sapiens
  source 1..22: mol_type = other DNA
ataatcctgccaagaagacagg

SEQ ID NO: 584 - DNA, 23 bp, Homo sapiens
  source 1..23: mol_type = other DNA
ttaatcctgcccagaataatagg

SEQ ID NO: 585 - DNA, 23 bp, Homo sapiens
  source 1..23: mol_type = other DNA
gtcatcctgccaggaatatggat

SEQ ID NO: 586 - DNA, 22 bp, Homo sapiens
  source 1..22: mol_type = other DNA
gccatctgccaaggaggaacgg

SEQ ID NO: 587 - DNA, 23 bp, Homo sapiens
  source 1..23: mol_type = other DNA
tccatcatgccaagaaacggggg

SEQ ID NO: 588 - DNA, 23 bp, Homo sapiens
  source 1..23: mol_type = other DNA
gccatcctaacaagtgtggggtg

SEQ ID NO: 589 - DNA, 22 bp, Homo sapiens
  source 1..22: mol_type = other DNA
gccaccatgccaagatgggagg

SEQ ID NO: 590 - DNA, 22 bp, Homo sapiens
  source 1..22: mol_type = other DNA
gccatcagacaagaaagagaga

SEQ ID NO: 591 - DNA, 21 bp, Homo sapiens
  source 1..21: mol_type = other DNA
gccaccccaaagaatgcgagg

SEQ ID NO: 592 - DNA, 23 bp, Homo sapiens
  source 1..23: mol_type = other DNA
gcccacatgccaaggatgaaggg

SEQ ID NO: 593 - DNA, 22 bp, Homo sapiens
  source 1..22: mol_type = other DNA
gctacatgccaaggatgagagc

SEQ ID NO: 594 - DNA, 23 bp, Homo sapiens
  source 1..23: mol_type = other DNA
tccttccagccaagaatgaaaag

SEQ ID NO: 595 - DNA, 23 bp, Homo sapiens
  source 1..23: mol_type = other DNA
aacatcctggaaagaatgtgtgg

SEQ ID NO: 596 - DNA, 23 bp, Homo sapiens
  source 1..23: mol_type = other DNA
gtcatactgccaagaaagaagaa

SEQ ID NO: 597 - DNA, 23 bp, Homo sapiens
  source 1..23: mol_type = other DNA
tccatcctgccaggaaagctggt

SEQ ID NO: 598 - DNA, 23 bp, Homo sapiens
  source 1..23: mol_type = other DNA
gcattcctaccaggaatgaatga

SEQ ID NO: 599 - DNA, 23 bp, Homo sapiens
  source 1..23: mol_type = other DNA
gccaccatgccaggagagaggag

SEQ ID NO: 600 - DNA, 23 bp, Homo sapiens
  source 1..23: mol_type = other DNA
tccatcctgccaagagtttccgg

SEQ ID NO: 601 - DNA, 23 bp, Homo sapiens
  source 1..23: mol_type = other DNA
accatcctgacaagtgtgaggca

SEQ ID NO: 602 - DNA, 23 bp, Homo sapiens
  source 1..23: mol_type = other DNA
gtgatcctgccaggaataaggag

SEQ ID NO: 603 - DNA, 23 bp, Homo sapiens
  source 1..23: mol_type = other DNA
gccatcatgccattaatcagagg

SEQ ID NO: 604 - DNA, 22 bp, Homo sapiens
  source 1..22: mol_type = other DNA
gtcatccagcaagaatgatagg

SEQ ID NO: 605 - DNA, 24 bp, Homo sapiens
  source 1..24: mol_type = other DNA
cctatactgccaaagaatgtgagg

SEQ ID NO: 606 - DNA, 22 bp, Homo sapiens
  source 1..22: mol_type = other DNA
gacatcctggaagaatgtgggg

SEQ ID NO: 607 - DNA, 22 bp, Homo sapiens
  source 1..22: mol_type = other DNA
gccatgtagcaagaatgagaag

SEQ ID NO: 608 - DNA, 21 bp, Homo sapiens
  source 1..21: mol_type = other DNA
gccatcctaaggaatgtgagg

SEQ ID NO: 609 - DNA, 23 bp, Homo sapiens
  source 1..23: mol_type = other DNA
tccatcctgtcaagatgaagtgg

SEQ ID NO: 610 - DNA, 21 bp, Homo sapiens
  source 1..21: mol_type = other DNA
gccattgccaagaaggaaagg

SEQ ID NO: 611 - DNA, 22 bp, Homo sapiens
  source 1..22: mol_type = other DNA
agcatactaccaagaagagagg

SEQ ID NO: 612 - DNA, 21 bp, Homo sapiens
  source 1..21: mol_type = other DNA
gctactgccaaggatgatggg

SEQ ID NO: 613 - DNA, 22 bp, Homo sapiens
  source 1..22: mol_type = other DNA
gccattcagccaagaagagagg

SEQ ID NO: 614 - DNA, 22 bp, Homo sapiens
  source 1..22: mol_type = other DNA
gccatctttcaaaaatgaggag

SEQ ID NO: 615 - DNA, 23 bp, Homo sapiens
  source 1..23: mol_type = other DNA
cacaacctgccaaaaatgagcag

SEQ ID NO: 616 - DNA, 22 bp, Homo sapiens
  source 1..22: mol_type = other DNA
gccatcagcaaagaatgtaagg

SEQ ID NO: 617 - DNA, 23 bp, Homo sapiens
  source 1..23: mol_type = other DNA
tatatccagcaaagaatgtgtgg

SEQ ID NO: 618 - DNA, 21 bp, Homo sapiens
  source 1..21: mol_type = other DNA
tccattgccaaaaatgaggag

SEQ ID NO: 619 - DNA, 23 bp, Homo sapiens
  source 1..23: mol_type = other DNA
actatcctgccaagcaaaagagg

SEQ ID NO: 620 - DNA, 23 bp, Homo sapiens
  source 1..23: mol_type = other DNA
taaatcctgccataaatgagaag

SEQ ID NO: 621 - DNA, 23 bp, Homo sapiens
  source 1..23: mol_type = other DNA
accatccaacctaggatgagaag

SEQ ID NO: 622 - DNA, 23 bp, Homo sapiens
  source 1..23: mol_type = other DNA
gccatcctgctaagaatctgatg

SEQ ID NO: 623 - DNA, 23 bp, Homo sapiens
  source 1..23: mol_type = other DNA
accatccttacaaaaatgaaagg

SEQ ID NO: 624 - DNA, 23 bp, Homo sapiens
  source 1..23: mol_type = other DNA
tcgtttctacaaagaatgagggg

SEQ ID NO: 625 - DNA, 23 bp, Homo sapiens
  source 1..23: mol_type = other DNA
aacagactatcaagaatgagagg

SEQ ID NO: 626 - DNA, 22 bp, Homo sapiens
  source 1..22: mol_type = other DNA
accatcctgtcaggaatagcag

SEQ ID NO: 627 - DNA, 24 bp, Homo sapiens
  source 1..24: mol_type = other DNA
tccatctctacaaagaatgaaggg

SEQ ID NO: 628 - DNA, 21 bp, Homo sapiens
  source 1..21: mol_type = other DNA
accatccctaagaatgggggg

SEQ ID NO: 629 - DNA, 24 bp, Homo sapiens
  source 1..24: mol_type = other DNA
gccatacttgccaagaaaggggga

SEQ ID NO: 630 - DNA, 23 bp, Homo sapiens
  source 1..23: mol_type = other DNA
gaggaactgccaaggatgagggg

SEQ ID NO: 631 - DNA, 23 bp, Homo sapiens
  source 1..23: mol_type = other DNA
tagatcctgcaaggaatgagtag

SEQ ID NO: 632 - DNA, 22 bp, Homo sapiens
  source 1..22: mol_type = other DNA
agcatcctccaggaatgagtag

SEQ ID NO: 633 - DNA, 23 bp, Homo sapiens
  source 1..23: mol_type = other DNA
gccatcttgccaaaaataatggc

SEQ ID NO: 634 - DNA, 22 bp, Homo sapiens
  source 1..22: mol_type = other DNA
tccaccttccaaaaatgagttg

SEQ ID NO: 635 - DNA, 23 bp, Homo sapiens
  source 1..23: mol_type = other DNA
gacatcctatcaggaatgggggt

SEQ ID NO: 636 - DNA, 23 bp, Homo sapiens
  source 1..23: mol_type = other DNA
accatactgccaaaaatgatcta

SEQ ID NO: 637 - DNA, 23 bp, Homo sapiens
  source 1..23: mol_type = other DNA
gacatcctaccaagaaggatgac

SEQ ID NO: 638 - DNA, 22 bp, Homo sapiens
  source 1..22: mol_type = other DNA
gccatccttcaagagtgagacg

SEQ ID NO: 639 - DNA, 23 bp, Homo sapiens
  source 1..23: mol_type = other DNA
tcaattataccaagaatgtgtgg

SEQ ID NO: 640 - DNA, 23 bp, Homo sapiens
  source 1..23: mol_type = other DNA
gcattactgccaagaatcaaagg

SEQ ID NO: 641 - DNA, 21 bp, Homo sapiens
  source 1..21: mol_type = other DNA
tccatacccaagaatgacagg

SEQ ID NO: 642 - DNA, 23 bp, Homo sapiens
  source 1..23: mol_type = other DNA
gccatcctgacaagtatgaggtg

SEQ ID NO: 643 - DNA, 21 bp, Homo sapiens
  source 1..21: mol_type = other DNA
gccatctgcaagaaggagagg

SEQ ID NO: 644 - DNA, 22 bp, Homo sapiens
  source 1..22: mol_type = other DNA
tccatcctgtaagaatgaggag

SEQ ID NO: 645 - DNA, 23 bp, Homo sapiens
  source 1..23: mol_type = other DNA
tccatcctgtcaagaatgtggca

SEQ ID NO: 646 - DNA, 23 bp, Homo sapiens
  source 1..23: mol_type = other DNA
atcatcctaacaagaatgacagg

SEQ ID NO: 647 - DNA, 23 bp, Homo sapiens
  source 1..23: mol_type = other DNA
agccacctgcccagaatgaggag

SEQ ID NO: 648 - DNA, 23 bp, Homo sapiens
  source 1..23: mol_type = other DNA
gccatcctaacaaatgtgaggtg

SEQ ID NO: 649 - DNA, 21 bp, Homo sapiens
  source 1..21: mol_type = other DNA
gccatcctaatgaatgtgagg

SEQ ID NO: 650 - DNA, 23 bp, Homo sapiens
  source 1..23: mol_type = other DNA
cccatcataccaagaatcaggag

SEQ ID NO: 651 - DNA, 23 bp, Homo sapiens
  source 1..23: mol_type = other DNA
accatcctgccaaatgtgagtgg

SEQ ID NO: 652 - DNA, 23 bp, Homo sapiens
  source 1..23: mol_type = other DNA
ttaatcctaccaggaatgaaagg

SEQ ID NO: 653 - DNA, 23 bp, Homo sapiens
  source 1..23: mol_type = other DNA
gctatccttccatgaatgaatgg

SEQ ID NO: 654 - DNA, 23 bp, Homo sapiens
  source 1..23: mol_type = other DNA
ctcatcctgtcaagaagcagggg

SEQ ID NO: 655 - DNA, 23 bp, Homo sapiens
  source 1..23: mol_type = other DNA
gccatcctaacaagagtgaggca

SEQ ID NO: 656 - DNA, 23 bp, Homo sapiens
  source 1..23: mol_type = other DNA
ggtatcctgccaagatgggaggg

SEQ ID NO: 657 - DNA, 24 bp, Homo sapiens
  source 1..24: mol_type = other DNA
gctatcctgccaagagatgggaac

SEQ ID NO: 658 - DNA, 23 bp, Homo sapiens
  source 1..23: mol_type = other DNA
ggcatcctgccaagactgagggg

SEQ ID NO: 659 - DNA, 23 bp, Homo sapiens
  source 1..23: mol_type = other DNA
gccatcctgcaaagaacgataag

SEQ ID NO: 660 - DNA, 23 bp, Homo sapiens
  source 1..23: mol_type = other DNA
gccatcctgacaagtgtgaggtg

SEQ ID NO: 661 - DNA, 23 bp, Homo sapiens
  source 1..23: mol_type = other DNA
gccaccctgccaagtgtggggag

SEQ ID NO: 662 - DNA, 23 bp, Homo sapiens
  source 1..23: mol_type = other DNA
cacatcctgcccaaaatgtgtgg

SEQ ID NO: 663 - DNA, 23 bp, Homo sapiens
  source 1..23: mol_type = other DNA
accatgccagcaagaatgatggg

SEQ ID NO: 664 - DNA, 21 bp, Homo sapiens
  source 1..21: mol_type = other DNA
gccatccccaagtgtgagggg

SEQ ID NO: 665 - DNA, 22 bp, Homo sapiens
  source 1..22: mol_type = other DNA
gccaactagcaagagtgagagg

SEQ ID NO: 666 - DNA, 23 bp, Homo sapiens
  source 1..23: mol_type = other DNA
gggattctaccaagaatgaaaag

SEQ ID NO: 667 - DNA, 23 bp, Homo sapiens
  source 1..23: mol_type = other DNA
accatcctgccaagaagcctgtg

SEQ ID NO: 668 - DNA, 23 bp, Homo sapiens
  source 1..23: mol_type = other DNA
acacacctgccaagaaggagatg

SEQ ID NO: 669 - DNA, 22 bp, Homo sapiens
  source 1..22: mol_type = other DNA
ttcacctgctaagaatgtgagg

SEQ ID NO: 670 - DNA, 21 bp, Homo sapiens
  source 1..21: mol_type = other DNA
gccaccctcaagagtgagggg

SEQ ID NO: 671 - DNA, 23 bp, Homo sapiens
  source 1..23: mol_type = other DNA
gccatcctgcccagaatggagac

SEQ ID NO: 672 - DNA, 22 bp, Homo sapiens
  source 1..22: mol_type = other DNA
tccatccacccaaaatgagaga

SEQ ID NO: 673 - DNA, 23 bp, Homo sapiens
  source 1..23: mol_type = other DNA
gcctgagtgccaagtatgaggtg

SEQ ID NO: 674 - DNA, 23 bp, Homo sapiens
  source 1..23: mol_type = other DNA
tccatcctgcaagggatgaaagg

SEQ ID NO: 675 - DNA, 23 bp, Homo sapiens
  source 1..23: mol_type = other DNA
gacacactgccatgaatgtgagg

SEQ ID NO: 676 - DNA, 23 bp, Homo sapiens
  source 1..23: mol_type = other DNA
caaatctagccaagaatgagtag

SEQ ID NO: 677 - DNA, 22 bp, Homo sapiens
  source 1..22: mol_type = other DNA
cccatcctccaggaatgacagg

SEQ ID NO: 678 - DNA, 22 bp, Homo sapiens
  source 1..22: mol_type = other DNA
gccttctgcaaaggatgagtga

SEQ ID NO: 679 - DNA, 23 bp, Homo sapiens
  source 1..23: mol_type = other DNA
gccatactgccagggatgggggt

SEQ ID NO: 680 - DNA, 22 bp, Homo sapiens
  source 1..22: mol_type = other DNA
aagatcctgcatgaatgagagg

SEQ ID NO: 681 - DNA, 21 bp, Homo sapiens
  source 1..21: mol_type = other DNA
gccactgcctagaatgagctg

SEQ ID NO: 682 - DNA, 22 bp, Homo sapiens
  source 1..22: mol_type = other DNA
gccaccctccaaggatctgagg

SEQ ID NO: 683 - DNA, 23 bp, Homo sapiens
  source 1..23: mol_type = other DNA
gccatactaacaagaatgaggtg

SEQ ID NO: 684 - DNA, 23 bp, Homo sapiens
  source 1..23: mol_type = other DNA
gacatcctaccaagaaggatgag

SEQ ID NO: 685 - DNA, 24 bp, Homo sapiens
  source 1..24: mol_type = other DNA
gccatcctgctcaagaatagctgg

SEQ ID NO: 686 - DNA, 23 bp, Homo sapiens
  source 1..23: mol_type = other DNA
gccatcctaccagatgtgaggtg

SEQ ID NO: 687 - DNA, 22 bp, Homo sapiens
  source 1..22: mol_type = other DNA
accatcagccaagaatatgcgg

SEQ ID NO: 688 - DNA, 23 bp, Homo sapiens
  source 1..23: mol_type = other DNA
actatcctgccaagtaggagggg

SEQ ID NO: 689 - DNA, 21 bp, Homo sapiens
  source 1..21: mol_type = other DNA
gccatcctaaagaatgtgaag

SEQ ID NO: 690 - DNA, 21 bp, Homo sapiens
  source 1..21: mol_type = other DNA
gccaataccaagaatgagaga

SEQ ID NO: 691 - DNA, 22 bp, Homo sapiens
  source 1..22: mol_type = other DNA
tccatcctgccaaaagcagagg

SEQ ID NO: 692 - DNA, 23 bp, Homo sapiens
  source 1..23: mol_type = other DNA
aacaccctgccaagaatggaggc

SEQ ID NO: 693 - DNA, 22 bp, Homo sapiens
  source 1..22: mol_type = other DNA
accatccagcaagaaggagtag

SEQ ID NO: 694 - DNA, 23 bp, Homo sapiens
  source 1..23: mol_type = other DNA
tctacactgccaagagtgagtgg

SEQ ID NO: 695 - DNA, 23 bp, Homo sapiens
  source 1..23: mol_type = other DNA
acctgactaccaagaatgagtag

SEQ ID NO: 696 - DNA, 21 bp, Homo sapiens
  source 1..21: mol_type = other DNA
gccatcattaagaatgagaga

SEQ ID NO: 697 - DNA, 23 bp, Homo sapiens
  source 1..23: mol_type = other DNA
gccatcctaataagtatgaagtg

SEQ ID NO: 698 - DNA, 23 bp, Homo sapiens
  source 1..23: mol_type = other DNA
tccatccttgcaagaatgagggg

SEQ ID NO: 699 - DNA, 21 bp, Homo sapiens
  source 1..21: mol_type = other DNA
gacattgccaagaatgaggtg

SEQ ID NO: 700 - DNA, 23 bp, Homo sapiens
  source 1..23: mol_type = other DNA
gacatactgccaaggaggagagg

SEQ ID NO: 701 - DNA, 24 bp, Homo sapiens
  source 1..24: mol_type = other DNA
tccatcactggcaagaatgactgg

SEQ ID NO: 702 - DNA, 23 bp, Homo sapiens
  source 1..23: mol_type = other DNA
agcatcctgccaaggattctggg

SEQ ID NO: 703 - DNA, 23 bp, Homo sapiens
  source 1..23: mol_type = other DNA
accatccttgcaagaataaagga

SEQ ID NO: 704 - DNA, 23 bp, Homo sapiens
  source 1..23: mol_type = other DNA
atcaaactgccaaaaatgagatg

SEQ ID NO: 705 - DNA, 22 bp, Homo sapiens
  source 1..22: mol_type = other DNA
cccatcctgtcagaatgactgg

SEQ ID NO: 706 - DNA, 22 bp, Homo sapiens
  source 1..22: mol_type = other DNA
cccatcctgcaacaatcagtgg

SEQ ID NO: 707 - DNA, 23 bp, Homo sapiens
  source 1..23: mol_type = other DNA
actttaatgccaagaatgaccgg

SEQ ID NO: 708 - DNA, 23 bp, Homo sapiens
  source 1..23: mol_type = other DNA
gccatcgtgcaaagaatgtgggc

SEQ ID NO: 709 - DNA, 22 bp, Homo sapiens
  source 1..22: mol_type = other DNA
gtcatctaccaagtatgagaga

SEQ ID NO: 710 - DNA, 23 bp, Homo sapiens
  source 1..23: mol_type = other DNA
gatctcctatcaagaaggagggg

SEQ ID NO: 711 - DNA, 22 bp, Homo sapiens
  source 1..22: mol_type = other DNA
gagacatgccaaggatgagagg

SEQ ID NO: 712 - DNA, 23 bp, Homo sapiens
  source 1..23: mol_type = other DNA
acaaacctgacaagaatgagcaa

SEQ ID NO: 713 - DNA, 23 bp, Homo sapiens
  source 1..23: mol_type = other DNA
aatttactgtcaagaatgagagg

SEQ ID NO: 714 - DNA, 23 bp, Homo sapiens
  source 1..23: mol_type = other DNA
gccatctctctaagaatgagtta

SEQ ID NO: 715 - DNA, 23 bp, Homo sapiens
  source 1..23: mol_type = other DNA
gccatcttgacaggaatgaggtg

SEQ ID NO: 716 - DNA, 22 bp, Homo sapiens
  source 1..22: mol_type = other DNA
gctatcctccaaaaatgaggaa

SEQ ID NO: 717 - DNA, 21 bp, Homo sapiens
  source 1..21: mol_type = other DNA
gccatcctgaagaaccagtgg

SEQ ID NO: 718 - DNA, 23 bp, Homo sapiens
  source 1..23: mol_type = other DNA
gccaccccgtcaaggatgtgagg

SEQ ID NO: 719 - DNA, 23 bp, Homo sapiens
  source 1..23: mol_type = other DNA
tccagtaagccaagaatgagggg

SEQ ID NO: 720 - DNA, 23 bp, Homo sapiens
  source 1..23: mol_type = other DNA
aatattttgccaagaatgagagg

SEQ ID NO: 721 - DNA, 23 bp, Homo sapiens
  source 1..23: mol_type = other DNA
accacactgccatgaatgagttt

SEQ ID NO: 722 - DNA, 23 bp, Homo sapiens
  source 1..23: mol_type = other DNA
gccatcctatgaagtatgaagtg

SEQ ID NO: 723 - DNA, 22 bp, Homo sapiens
  source 1..22: mol_type = other DNA
ggccaccttccaagaagagggg

SEQ ID NO: 724 - DNA, 22 bp, Homo sapiens
  source 1..22: mol_type = other DNA
gctaccataccaagaagagagg

SEQ ID NO: 725 - DNA, 21 bp, Homo sapiens
  source 1..21: mol_type = other DNA
gccatcctcaataatgaggat

SEQ ID NO: 726 - DNA, 21 bp, Homo sapiens
  source 1..21: mol_type = other DNA
actatcctgaagaattagtgg

SEQ ID NO: 727 - DNA, 23 bp, Homo sapiens
  source 1..23: mol_type = other DNA
tccatcccaccaagtatatgtgg

SEQ ID NO: 728 - DNA, 22 bp, Homo sapiens
  source 1..22: mol_type = other DNA
gccatatgccaaaaaggagtgg

SEQ ID NO: 729 - DNA, 21 bp, Homo sapiens
  source 1..21: mol_type = other DNA
gccaccctaaagaatgagcag

SEQ ID NO: 730 - DNA, 23 bp, Homo sapiens
  source 1..23: mol_type = other DNA
cctaccctgccaaggatgagggt

SEQ ID NO: 731 - DNA, 23 bp, Homo sapiens
  source 1..23: mol_type = other DNA
gccatcctaacaagtatgaggta

SEQ ID NO: 732 - DNA, 22 bp, Homo sapiens
  source 1..22: mol_type = other DNA
gccatcttgcaagcatgaggag

SEQ ID NO: 733 - DNA, 23 bp, Homo sapiens
  source 1..23: mol_type = other DNA
tatattctgccaagaatcagaag

SEQ ID NO: 734 - DNA, 23 bp, Homo sapiens
  source 1..23: mol_type = other DNA
accaccctgccaggaacaagagg

SEQ ID NO: 735 - DNA, 22 bp, Homo sapiens
  source 1..22: mol_type = other DNA
gccatccaccatgaatgtggag

SEQ ID NO: 736 - DNA, 21 bp, Homo sapiens
  source 1..21: mol_type = other DNA
gccattgccaagaacgagata

SEQ ID NO: 737 - DNA, 22 bp, Homo sapiens
  source 1..22: mol_type = other DNA
gacatcctaccagaatgaagag

SEQ ID NO: 738 - DNA, 22 bp, Homo sapiens
  source 1..22: mol_type = other DNA
ggcctactgcaagaatgaggag

SEQ ID NO: 739 - DNA, 23 bp, Homo sapiens
  source 1..23: mol_type = other DNA
accatcctgccaggattgaggag

SEQ ID NO: 740 - DNA, 21 bp, Homo sapiens
  source 1..21: mol_type = other DNA
gccattgccaagaatgacagt

SEQ ID NO: 741 - DNA, 22 bp, Homo sapiens
  source 1..22: mol_type = other DNA
gtcaccctgccaaaatgtgcgg

SEQ ID NO: 742 - DNA, 22 bp, Homo sapiens
  source 1..22: mol_type = other DNA
gccatcaagccaagaagagagg

SEQ ID NO: 743 - DNA, 21 bp, Homo sapiens
  source 1..21: mol_type = other DNA
tccatcttaccaagagagtgg

SEQ ID NO: 744 - DNA, 23 bp, Homo sapiens
  source 1..23: mol_type = other DNA
gctattctgtcaaggatatgagg

SEQ ID NO: 745 - DNA, 23 bp, Homo sapiens
  source 1..23: mol_type = other DNA
accttccagcaaagaatgagtgg

SEQ ID NO: 746 - DNA, 22 bp, Homo sapiens
  source 1..22: mol_type = other DNA
gccatcagccaagagtgaggat

SEQ ID NO: 747 - DNA, 25 bp, Homo sapiens
  source 1..25: mol_type = other DNA
gccatcctgcaaaatgaagaagtag

SEQ ID NO: 748 - DNA, 23 bp, Homo sapiens
  source 1..23: mol_type = other DNA
accatcctgccaaggaccagtga

SEQ ID NO: 749 - DNA, 23 bp, Homo sapiens
  source 1..23: mol_type = other DNA
accatccttacagtaatgaggga

SEQ ID NO: 750 - DNA, 23 bp, Homo sapiens
  source 1..23: mol_type = other DNA
gccatcctagtaagtatgaagtg

SEQ ID NO: 751 - DNA, 23 bp, Homo sapiens
  source 1..23: mol_type = other DNA
gttctcctaccaagaataaaggg

SEQ ID NO: 752 - DNA, 23 bp, Homo sapiens
  source 1..23: mol_type = other DNA
acccaaatgccaagaatgagaga

SEQ ID NO: 753 - DNA, 23 bp, Homo sapiens
  source 1..23: mol_type = other DNA
aaaatgctaccaaggatgagagg

SEQ ID NO: 754 - DNA, 23 bp, Homo sapiens
  source 1..23: mol_type = other DNA
ccactacttccaagaatgagtgc

SEQ ID NO: 755 - DNA, 22 bp, Homo sapiens
  source 1..22: mol_type = other DNA
tgcatcttgcaagaatgagtga

SEQ ID NO: 756 - DNA, 22 bp, Homo sapiens
  source 1..22: mol_type = other DNA
acaatcctgaaagaatgtgggg

SEQ ID NO: 757 - DNA, 22 bp, Homo sapiens
  source 1..22: mol_type = other DNA
cccatcctgccataatgtggag

SEQ ID NO: 758 - DNA, 23 bp, Homo sapiens
  source 1..23: mol_type = other DNA
gccattctgacaaatgtgaggtg

SEQ ID NO: 759 - DNA, 23 bp, Homo sapiens
  source 1..23: mol_type = other DNA
atcctcctaccaagaataactgg

SEQ ID NO: 760 - DNA, 21 bp, Homo sapiens
  source 1..21: mol_type = other DNA
tccatactgaagaatgaggag

SEQ ID NO: 761 - DNA, 23 bp, Homo sapiens
  source 1..23: mol_type = other DNA
tcagtcctgccaacaatgatggg

SEQ ID NO: 762 - DNA, 23 bp, Homo sapiens
  source 1..23: mol_type = other DNA
gccatcctagtaagtatgaggtg

SEQ ID NO: 763 - DNA, 23 bp, Homo sapiens
  source 1..23: mol_type = other DNA
aacatccagccaagaatgaggtt

SEQ ID NO: 764 - DNA, 23 bp, Homo sapiens
  source 1..23: mol_type = other DNA
gcttaactgccagaaatgagggg

SEQ ID NO: 765 - DNA, 24 bp, Homo sapiens
  source 1..24: mol_type = other DNA
gccttaatgccaaagaatgaacgg

SEQ ID NO: 766 - DNA, 23 bp, Homo sapiens
  source 1..23: mol_type = other DNA
gccattctgacaagtatgaggtg

SEQ ID NO: 767 - DNA, 23 bp, Homo sapiens
  source 1..23: mol_type = other DNA
aacatttagccaacaatgagtgg

SEQ ID NO: 768 - DNA, 21 bp, Homo sapiens
  source 1..21: mol_type = other DNA
gccactgccaagaatgttgag

SEQ ID NO: 769 - DNA, 22 bp, Homo sapiens
  source 1..22: mol_type = other DNA
accatcctgcaaccatgagtgg

SEQ ID NO: 770 - DNA, 22 bp, Homo sapiens
  source 1..22: mol_type = other DNA
gccatctgcaaagaaagagatg

SEQ ID NO: 771 - DNA, 22 bp, Homo sapiens
  source 1..22: mol_type = other DNA
gccatcctgctaagaagtgtga

SEQ ID NO: 772 - DNA, 23 bp, Homo sapiens
  source 1..23: mol_type = other DNA
gccatactgcaaagaattggagt

SEQ ID NO: 773 - DNA, 23 bp, Homo sapiens
  source 1..23: mol_type = other DNA
cctatcctgccaagaaaataagg

SEQ ID NO: 774 - DNA, 21 bp, Homo sapiens
  source 1..21: mol_type = other DNA
gccatcctcaagaatgggaaa

SEQ ID NO: 775 - DNA, 23 bp, Homo sapiens
  source 1..23: mol_type = other DNA
accatcctgtcaagaatcaagag

SEQ ID NO: 776 - DNA, 23 bp, Homo sapiens
  source 1..23: mol_type = other DNA
gacatcctgtcaaggatcagtgg

SEQ ID NO: 777 - DNA, 23 bp, Homo sapiens
  source 1..23: mol_type = other DNA
gtcatcctgccaggaatgaaaga

SEQ ID NO: 778 - DNA, 23 bp, Homo sapiens
  source 1..23: mol_type = other DNA
gatatcctaccaagaatcatggc

SEQ ID NO: 779 - DNA, 21 bp, Homo sapiens
  source 1..21: mol_type = other DNA
tccattctgccaaataagtgg

SEQ ID NO: 780 - DNA, 23 bp, Homo sapiens
  source 1..23: mol_type = other DNA
tccatccttccaagaagaagggg

SEQ ID NO: 781 - DNA, 23 bp, Homo sapiens
  source 1..23: mol_type = other DNA
gccatcctgacaaatgtgaggtt

SEQ ID NO: 782 - DNA, 23 bp, Homo sapiens
  source 1..23: mol_type = other DNA
aggatactgccaaggatgtgtgg

SEQ ID NO: 783 - DNA, 22 bp, Homo sapiens
  source 1..22: mol_type = other DNA
gccaccctggaagaatgagtga

SEQ ID NO: 784 - DNA, 22 bp, Homo sapiens
  source 1..22: mol_type = other DNA
accacatgccaacaatgagatg

SEQ ID NO: 785 - DNA, 23 bp, Homo sapiens
  source 1..23: mol_type = other DNA
gccaccctgccaatgagaagaag

SEQ ID NO: 786 - DNA, 23 bp, Homo sapiens
  source 1..23: mol_type = other DNA
gcatatctgccaaggataagggg

SEQ ID NO: 787 - DNA, 22 bp, Homo sapiens
  source 1..22: mol_type = other DNA
accattctccaagaatgaggtg

SEQ ID NO: 788 - DNA, 23 bp, Homo sapiens
  source 1..23: mol_type = other DNA
cacaccctgcccagaatgaggag

SEQ ID NO: 789 - DNA, 23 bp, Homo sapiens
  source 1..23: mol_type = other DNA
gccatcctgccttgagtgagagg

SEQ ID NO: 790 - DNA, 24 bp, Homo sapiens
  source 1..24: mol_type = other DNA
gaggtcctagccaaggatgagggg

SEQ ID NO: 791 - DNA, 23 bp, Homo sapiens
  source 1..23: mol_type = other DNA
gccatattggcaagaatgagaga

SEQ ID NO: 792 - DNA, 22 bp, Homo sapiens
  source 1..22: mol_type = other DNA
gtcatattgccaagaatagtgg

SEQ ID NO: 793 - DNA, 23 bp, Homo sapiens
  source 1..23: mol_type = other DNA
agctacctaccaagaaggagagg

SEQ ID NO: 794 - DNA, 22 bp, Homo sapiens
  source 1..22: mol_type = other DNA
tccatctaccaagaaagagaga

SEQ ID NO: 795 - DNA, 22 bp, Homo sapiens
  source 1..22: mol_type = other DNA
tacaacctgccagaatgatggg

SEQ ID NO: 796 - DNA, 22 bp, Homo sapiens
  source 1..22: mol_type = other DNA
ccaatcctccaagaataaaagg

SEQ ID NO: 797 - DNA, 23 bp, Homo sapiens
  source 1..23: mol_type = other DNA
cacatcatgcccagaatgatggg

SEQ ID NO: 798 - DNA, 23 bp, Homo sapiens
  source 1..23: mol_type = other DNA
tacattatgccaaaaatgaatgg

SEQ ID NO: 799 - DNA, 22 bp, Homo sapiens
  source 1..22: mol_type = other DNA
gccaaaagccaaggatgagggg

SEQ ID NO: 800 - DNA, 23 bp, Homo sapiens
  source 1..23: mol_type = other DNA
atcaccctgccaaaaatgaaggt

SEQ ID NO: 801 - DNA, 22 bp, Homo sapiens
  source 1..22: mol_type = other DNA
accatcagcaaagaatgagagt

SEQ ID NO: 802 - DNA, 23 bp, Homo sapiens
  source 1..23: mol_type = other DNA
gtcatactatcaaggatgaaagg

SEQ ID NO: 803 - DNA, 23 bp, Homo sapiens
  source 1..23: mol_type = other DNA
tccatcctaccaagaaccaggaa

SEQ ID NO: 804 - DNA, 23 bp, Homo sapiens
  source 1..23: mol_type = other DNA
gccatcctcccagtaatgagtga

SEQ ID NO: 805 - DNA, 23 bp, Homo sapiens
  source 1..23: mol_type = other DNA
accatcctcacaataatgagtga

SEQ ID NO: 806 - DNA, 21 bp, Homo sapiens
  source 1..21: mol_type = other DNA
gctattgccaaaaatgagggt

SEQ ID NO: 807 - DNA, 23 bp, Homo sapiens
  source 1..23: mol_type = other DNA
gctaccttaccaagaatgagaga

SEQ ID NO: 808 - DNA, 23 bp, Homo sapiens
  source 1..23: mol_type = other DNA
gacatcctgccaagaattagctt

SEQ ID NO: 809 - DNA, 23 bp, Homo sapiens
  source 1..23: mol_type = other DNA
cacatactaccaataatgagtga

SEQ ID NO: 810 - DNA, 22 bp, Homo sapiens
  source 1..22: mol_type = other DNA
gccattttgcaagaatgagaat

SEQ ID NO: 811 - DNA, 23 bp, Homo sapiens
  source 1..23: mol_type = other DNA
gccaaatagccaagaatgaaaga

SEQ ID NO: 812 - DNA, 21 bp, Homo sapiens
  source 1..21: mol_type = other DNA
gccatcctaacaggtgagagg

SEQ ID NO: 813 - DNA, 21 bp, Homo sapiens
  source 1..21: mol_type = other DNA
ggcaatgccaagaatgaaggg

SEQ ID NO: 814 - DNA, 23 bp, Homo sapiens
  source 1..23: mol_type = other DNA
aaaatccagccaagaatgaggta

SEQ ID NO: 815 - DNA, 22 bp, Homo sapiens
  source 1..22: mol_type = other DNA
atcatcctgacaaaatgtgagg

SEQ ID NO: 816 - DNA, 23 bp, Homo sapiens
  source 1..23: mol_type = other DNA
gggattctgacaagaatgttggg

SEQ ID NO: 817 - DNA, 23 bp, Homo sapiens
  source 1..23: mol_type = other DNA
gccatagtataaagaatgaatgg

SEQ ID NO: 818 - DNA, 23 bp, Homo sapiens
  source 1..23: mol_type = other DNA
gccatcccgccaggaattatagg

SEQ ID NO: 819 - DNA, 23 bp, Homo sapiens
  source 1..23: mol_type = other DNA
gccatatgccaaagaaagagtgg

SEQ ID NO: 820 - DNA, 23 bp, Homo sapiens
  source 1..23: mol_type = other DNA
gccatcccgccaaaaatgaaaga

SEQ ID NO: 821 - DNA, 23 bp, Homo sapiens
  source 1..23: mol_type = other DNA
aatatcctgccaagaaaatgggg

SEQ ID NO: 822 - DNA, 22 bp, Homo sapiens
  source 1..22: mol_type = other DNA
tccatccaccaagaatgaaagg

SEQ ID NO: 823 - DNA, 24 bp, Homo sapiens
  source 1..24: mol_type = other DNA
gccatcctaccacagaatgaggtt

SEQ ID NO: 824 - DNA, 23 bp, Homo sapiens
  source 1..23: mol_type = other DNA
gccatctggccaagtatgaagtg

SEQ ID NO: 825 - DNA, 21 bp, Homo sapiens
  source 1..21: mol_type = other DNA
gccatcccccaaaatgactgg

SEQ ID NO: 826 - DNA, 22 bp, Homo sapiens
  source 1..22: mol_type = other DNA
tccatataccaagaaggagagg

SEQ ID NO: 827 - DNA, 22 bp, Homo sapiens
  source 1..22: mol_type = other DNA
gttatctgccaagagtgaaggg

SEQ ID NO: 828 - DNA, 22 bp, Homo sapiens
  source 1..22: mol_type = other DNA
acaatcctgccatgaatagagg

SEQ ID NO: 829 - DNA, 22 bp, Homo sapiens
  source 1..22: mol_type = other DNA
ctcatcctccaagaatgaaagg

SEQ ID NO: 830 - DNA, 23 bp, Homo sapiens
  source 1..23: mol_type = other DNA
actctactgccaagaatgaggtt

SEQ ID NO: 831 - DNA, 23 bp, Homo sapiens
  source 1..23: mol_type = other DNA
tcatacctgccaagagcgagtgg

SEQ ID NO: 832 - DNA, 21 bp, Homo sapiens
  source 1..21: mol_type = other DNA
cccatccccaggaatgagagg

SEQ ID NO: 833 - DNA, 22 bp, Homo sapiens
  source 1..22: mol_type = other DNA
gccattggccaagaatgaggaa

SEQ ID NO: 834 - DNA, 22 bp, Homo sapiens
  source 1..22: mol_type = other DNA
actatccagccaagaagagcag

SEQ ID NO: 835 - DNA, 22 bp, Homo sapiens
  source 1..22: mol_type = other DNA
tccaccctaccaaggatagagg

SEQ ID NO: 836 - DNA, 23 bp, Homo sapiens
  source 1..23: mol_type = other DNA
cccatccaagaaagaatgtgagg

SEQ ID NO: 837 - DNA, 21 bp, Homo sapiens
  source 1..21: mol_type = other DNA
accatccagccaaatgattgg

SEQ ID NO: 838 - DNA, 23 bp, Homo sapiens
  source 1..23: mol_type = other DNA
gcttccatgccaagaataaggga

SEQ ID NO: 839 - DNA, 23 bp, Homo sapiens
  source 1..23: mol_type = other DNA
cctaccctgcaagaaatgagagg

SEQ ID NO: 840 - DNA, 23 bp, Homo sapiens
  source 1..23: mol_type = other DNA
gccatcctccaagaaaaaagggg

SEQ ID NO: 841 - DNA, 21 bp, Homo sapiens
  source 1..21: mol_type = other DNA
gccatcctgcctattgagtgg

SEQ ID NO: 842 - DNA, 21 bp, Homo sapiens
  source 1..21: mol_type = other DNA
gccaacctgacaaatgtgagg

SEQ ID NO: 843 - DNA, 23 bp, Homo sapiens
  source 1..23: mol_type = other DNA
accatccttccaagaagatgggg

SEQ ID NO: 844 - DNA, 23 bp, Homo sapiens
  source 1..23: mol_type = other DNA
cccatcctgccaagagccagcgg

SEQ ID NO: 845 - DNA, 22 bp, Homo sapiens
  source 1..22: mol_type = other DNA
gccatcctaacaaaatgtgagg

SEQ ID NO: 846 - DNA, 22 bp, Homo sapiens
  source 1..22: mol_type = other DNA
ttcatccaccaagaatgagaga

SEQ ID NO: 847 - DNA, 23 bp, Homo sapiens
  source 1..23: mol_type = other DNA
gccatcctaacaggaatgaaatg

SEQ ID NO: 848 - DNA, 24 bp, Homo sapiens
  source 1..24: mol_type = other DNA
tccatccctaccatgaatcagtgg

SEQ ID NO: 849 - DNA, 23 bp, Homo sapiens
  source 1..23: mol_type = other DNA
gacttcctaccaagaatgaagtg

SEQ ID NO: 850 - DNA, 21 bp, Homo sapiens
  source 1..21: mol_type = other DNA
gccattagcaagaaggagagg

SEQ ID NO: 851 - DNA, 23 bp, Homo sapiens
  source 1..23: mol_type = other DNA
gccattctgccatcaatgaggtg

SEQ ID NO: 852 - DNA, 23 bp, Homo sapiens
  source 1..23: mol_type = other DNA
ttaatcctacaaagaatgagaag

SEQ ID NO: 853 - DNA, 22 bp, Homo sapiens
  source 1..22: mol_type = other DNA
gccagatgccaggaatgagagg

SEQ ID NO: 854 - DNA, 24 bp, Homo sapiens
  source 1..24: mol_type = other DNA
gccatcctagccaaggatgagaaa

SEQ ID NO: 855 - DNA, 23 bp, Homo sapiens
  source 1..23: mol_type = other DNA
gccttcctaccaaggatgatgca

SEQ ID NO: 856 - DNA, 22 bp, Homo sapiens
  source 1..22: mol_type = other DNA
gatatccttccagaatgaaggg

SEQ ID NO: 857 - DNA, 22 bp, Homo sapiens
  source 1..22: mol_type = other DNA
gccatccaaacaagaaaagagg

SEQ ID NO: 858 - DNA, 23 bp, Homo sapiens
  source 1..23: mol_type = other DNA
tgcaatctgccaagaatgagttg

SEQ ID NO: 859 - DNA, 23 bp, Homo sapiens
  source 1..23: mol_type = other DNA
caaatcctgcaaagaatgaaacg

SEQ ID NO: 860 - DNA, 23 bp, Homo sapiens
  source 1..23: mol_type = other DNA
cccatcatgccaggaatggggtg

SEQ ID NO: 861 - DNA, 22 bp, Homo sapiens
  source 1..22: mol_type = other DNA
gccaacagccaagagtgaggtg

SEQ ID NO: 862 - DNA, 22 bp, Homo sapiens
  source 1..22: mol_type = other DNA
tccacactgaaagaatgagagg

SEQ ID NO: 863 - DNA, 23 bp, Homo sapiens
  source 1..23: mol_type = other DNA
gtgatccttccaagaatgaagaa

SEQ ID NO: 864 - DNA, 23 bp, Homo sapiens
  source 1..23: mol_type = other DNA
tagagcctgtcaagaatgagggg

SEQ ID NO: 865 - DNA, 23 bp, Homo sapiens
  source 1..23: mol_type = other DNA
gccaacctcccaagaatgggttt

SEQ ID NO: 866 - DNA, 22 bp, Homo sapiens
  source 1..22: mol_type = other DNA
accatccagcaaagaagagaag

SEQ ID NO: 867 - DNA, 22 bp, Homo sapiens
  source 1..22: mol_type = other DNA
gccatcctccaggaataagaga

SEQ ID NO: 868 - DNA, 22 bp, Homo sapiens
  source 1..22: mol_type = other DNA
tgcatcctccaaggataagggg

SEQ ID NO: 869 - DNA, 22 bp, Homo sapiens
  source 1..22: mol_type = other DNA
gccatcagccaagaatcacagc

SEQ ID NO: 870 - DNA, 22 bp, Homo sapiens
  source 1..22: mol_type = other DNA
gccacctaccaagaagaagaga

SEQ ID NO: 871 - DNA, 22 bp, Homo sapiens
  source 1..22: mol_type = other DNA
gacatcctgccagaacaagggc

SEQ ID NO: 872 - DNA, 22 bp, Homo sapiens
  source 1..22: mol_type = other DNA
gccatcctccaagaatgctggg

SEQ ID NO: 873 - DNA, 23 bp, Homo sapiens
  source 1..23: mol_type = other DNA
gccatattgccaagaatgatgag

SEQ ID NO: 874 - DNA, 23 bp, Homo sapiens
  source 1..23: mol_type = other DNA
gccatcctgctaagtatgcagtg

SEQ ID NO: 875 - DNA, 23 bp, Homo sapiens
  source 1..23: mol_type = other DNA
accatcctgtaaagaatgatgaa

SEQ ID NO: 876 - DNA, 23 bp, Homo sapiens
  source 1..23: mol_type = other DNA
gccatgcagccaagaataaggtg

SEQ ID NO: 877 - DNA, 22 bp, Homo sapiens
  source 1..22: mol_type = other DNA
gccatccttacaagaagagaag

SEQ ID NO: 878 - DNA, 21 bp, Homo sapiens
  source 1..21: mol_type = other DNA
gccatcctgccaggtgagtgg

SEQ ID NO: 879 - DNA, 23 bp, Homo sapiens
  source 1..23: mol_type = other DNA
acattattgccaagtatgagggg

SEQ ID NO: 880 - DNA, 22 bp, Homo sapiens
  source 1..22: mol_type = other DNA
atcatctgccgagaatgaggtg

SEQ ID NO: 881 - DNA, 22 bp, Homo sapiens
  source 1..22: mol_type = other DNA
tttatcctgccaagatgagttg

SEQ ID NO: 882 - DNA, 23 bp, Homo sapiens
  source 1..23: mol_type = other DNA
gtcatccagccgagaatgggagg

SEQ ID NO: 883 - DNA, 23 bp, Homo sapiens
  source 1..23: mol_type = other DNA
gactcactgacaagaatgagaag

SEQ ID NO: 884 - DNA, 23 bp, Homo sapiens
  source 1..23: mol_type = other DNA
gccaacctaccaagaatgaagct

SEQ ID NO: 885 - DNA, 22 bp, Homo sapiens
  source 1..22: mol_type = other DNA
gtcatccctcaaggatgagagg

SEQ ID NO: 886 - DNA, 24 bp, Homo sapiens
  source 1..24: mol_type = other DNA
gccatcctgccagaagatgaagcg

SEQ ID NO: 887 - DNA, 23 bp, Homo sapiens
  source 1..23: mol_type = other DNA
gccatcctgcaaggaatgaggac

SEQ ID NO: 888 - DNA, 23 bp, Homo sapiens
  source 1..23: mol_type = other DNA
gggatcctgccagaaatgagggg

SEQ ID NO: 889 - DNA, 23 bp, Homo sapiens
  source 1..23: mol_type = other DNA
accatccagctatgaatgactgg

SEQ ID NO: 890 - DNA, 23 bp, Homo sapiens
  source 1..23: mol_type = other DNA
gccatccagccaagcaagaaggg

SEQ ID NO: 891 - DNA, 24 bp, Homo sapiens
  source 1..24: mol_type = other DNA
gtcatcactgccaagaacaagagg

SEQ ID NO: 892 - DNA, 23 bp, Homo sapiens
  source 1..23: mol_type = other DNA
ctattcctgccaagaatgcatgg

SEQ ID NO: 893 - DNA, 23 bp, Homo sapiens
  source 1..23: mol_type = other DNA
ttcatcctgccaagagtgagctg

SEQ ID NO: 894 - DNA, 22 bp, Homo sapiens
  source 1..22: mol_type = other DNA
gccatcctgctaaaatcagggg

SEQ ID NO: 895 - DNA, 24 bp, Homo sapiens
  source 1..24: mol_type = other DNA
cccatcactgccaagaaagaggga

SEQ ID NO: 896 - DNA, 22 bp, Homo sapiens
  source 1..22: mol_type = other DNA
gccacactgccagaatgagaag

SEQ ID NO: 897 - DNA, 23 bp, Homo sapiens
  source 1..23: mol_type = other DNA
atactcctgccaaaaatgattgg

SEQ ID NO: 898 - DNA, 22 bp, Homo sapiens
  source 1..22: mol_type = other DNA
accatccttcaggaatgaaggg

SEQ ID NO: 899 - DNA, 23 bp, Homo sapiens
  source 1..23: mol_type = other DNA
gccatgctgccaagaatactgga

SEQ ID NO: 900 - DNA, 23 bp, Homo sapiens
  source 1..23: mol_type = other DNA
gccatcctgccagagaagaggcc

SEQ ID NO: 901 - DNA, 22 bp, Homo sapiens
  source 1..22: mol_type = other DNA
accacactgccaaaataagagg

SEQ ID NO: 902 - DNA, 22 bp, Homo sapiens
  source 1..22: mol_type = other DNA
gccatcctgaaagaaagaggga

SEQ ID NO: 903 - DNA, 22 bp, Homo sapiens
  source 1..22: mol_type = other DNA
gccacactggaagaatgagagg

SEQ ID NO: 904 - DNA, 22 bp, Homo sapiens
  source 1..22: mol_type = other DNA
accatcctctaagaataagaga

SEQ ID NO: 905 - DNA, 23 bp, Homo sapiens
  source 1..23: mol_type = other DNA
tccattctaccaagaaagaggta

SEQ ID NO: 906 - DNA, 24 bp, Homo sapiens
  source 1..24: mol_type = other DNA
gccatccagccaggagatgagagg

SEQ ID NO: 907 - DNA, 23 bp, Homo sapiens
  source 1..23: mol_type = other DNA
gccatccttgaagtaatgagtgg

SEQ ID NO: 908 - DNA, 22 bp, Homo sapiens
  source 1..22: mol_type = other DNA
gccaccatccaagaatgagaga

SEQ ID NO: 909 - DNA, 23 bp, Homo sapiens
  source 1..23: mol_type = other DNA
accaacctgccaggcatgtgggt

SEQ ID NO: 910 - DNA, 23 bp, Homo sapiens
  source 1..23: mol_type = other DNA
gccatcctaacaagtgtgaggga

SEQ ID NO: 911 - DNA, 23 bp, Homo sapiens
  source 1..23: mol_type = other DNA
ggaattatgccaagattgaggag

SEQ ID NO: 912 - DNA, 21 bp, Homo sapiens
  source 1..21: mol_type = other DNA
gccatcctgtcgtatgagaag

SEQ ID NO: 913 - DNA, 21 bp, Homo sapiens
  source 1..21: mol_type = other DNA
gccatcccgaagaatgagcag

SEQ ID NO: 914 - DNA, 22 bp, Homo sapiens
  source 1..22: mol_type = other DNA
gctatatgctaagaatgtgagg

SEQ ID NO: 915 - DNA, 23 bp, Homo sapiens
  source 1..23: mol_type = other DNA
gccatcctgataagtatgaggtg

SEQ ID NO: 916 - DNA, 23 bp, Homo sapiens
  source 1..23: mol_type = other DNA
ttcttcctaccaaaaatgagaga

SEQ ID NO: 917 - DNA, 23 bp, Homo sapiens
  source 1..23: mol_type = other DNA
gctatactgctaagaatgttagg

SEQ ID NO: 918 - DNA, 23 bp, Homo sapiens
  source 1..23: mol_type = other DNA
gccatcaagccaagaataaagtg

SEQ ID NO: 919 - DNA, 24 bp, Homo sapiens
  source 1..24: mol_type = other DNA
gccatcctgctaagagatgtggaa

SEQ ID NO: 920 - DNA, 22 bp, Homo sapiens
  source 1..22: mol_type = other DNA
agcaccctgccaagaagagcag

SEQ ID NO: 921 - DNA, 22 bp, Homo sapiens
  source 1..22: mol_type = other DNA
gccacctgctaaggatgagaga

SEQ ID NO: 922 - DNA, 23 bp, Homo sapiens
  source 1..23: mol_type = other DNA
gctatccttccaaaaatgaagga

SEQ ID NO: 923 - DNA, 23 bp, Homo sapiens
  source 1..23: mol_type = other DNA
gccatcctaacaagtgagaggtg

SEQ ID NO: 924 - DNA, 22 bp, Homo sapiens
  source 1..22: mol_type = other DNA
gccatcagccagggatgtgtgg

SEQ ID NO: 925 - DNA, 23 bp, Homo sapiens
  source 1..23: mol_type = other DNA
gccatcccccaaaggatgagtag

SEQ ID NO: 926 - DNA, 23 bp, Homo sapiens
  source 1..23: mol_type = other DNA
accatcctgacaggtatgaggtg

SEQ ID NO: 927 - DNA, 22 bp, Homo sapiens
  source 1..22: mol_type = other DNA
gccaccctgacaaaataagagg

SEQ ID NO: 928 - DNA, 23 bp, Homo sapiens
  source 1..23: mol_type = other DNA
ggggtcctaccaagaaagaggtg

SEQ ID NO: 929 - DNA, 22 bp, Homo sapiens
  source 1..22: mol_type = other DNA
aacatcctccaagaatgaagag

SEQ ID NO: 930 - DNA, 22 bp, Homo sapiens
  source 1..22: mol_type = other DNA
tgcatccaggaagaatgagagg

SEQ ID NO: 931 - DNA, 23 bp, Homo sapiens
  source 1..23: mol_type = other DNA
agcaacctgccaaaaatgagaag

SEQ ID NO: 932 - DNA, 23 bp, Homo sapiens
  source 1..23: mol_type = other DNA
gcaacatagccaagaatgagcag

SEQ ID NO: 933 - DNA, 23 bp, Homo sapiens
  source 1..23: mol_type = other DNA
gcggtccttacaagtatgaggtg

SEQ ID NO: 934 - DNA, 23 bp, Homo sapiens
  source 1..23: mol_type = other DNA
gtgatattgccaagagtgaggtg

SEQ ID NO: 935 - DNA, 24 bp, Homo sapiens
  source 1..24: mol_type = other DNA
tccatctctgtcaacaatgaggtg

SEQ ID NO: 936 - DNA, 23 bp, Homo sapiens
  source 1..23: mol_type = other DNA
tctatattgccaaaaatgatagg

SEQ ID NO: 937 - DNA, 24 bp, Homo sapiens
  source 1..24: mol_type = other DNA
gtcatcctatccaagaatgagccg

SEQ ID NO: 938 - DNA, 23 bp, Homo sapiens
  source 1..23: mol_type = other DNA
acccttatgccaagaatgagttc

SEQ ID NO: 939 - DNA, 21 bp, Homo sapiens
  source 1..21: mol_type = other DNA
atcatcctgcagaattagtgg

SEQ ID NO: 940 - DNA, 23 bp, Homo sapiens
  source 1..23: mol_type = other DNA
cccatcctgccaagagacaaggg

SEQ ID NO: 941 - DNA, 22 bp, Homo sapiens
  source 1..22: mol_type = other DNA
gccatcctgtaagaataaggat

SEQ ID NO: 942 - DNA, 23 bp, Homo sapiens
  source 1..23: mol_type = other DNA
accatcctgccagcaatgtgagg

SEQ ID NO: 943 - DNA, 21 bp, Homo sapiens
  source 1..21: mol_type = other DNA
gccatccaaaaggatgagagg

SEQ ID NO: 944 - DNA, 23 bp, Homo sapiens
  source 1..23: mol_type = other DNA
ttcatcctgccaagagtgggggg

SEQ ID NO: 945 - DNA, 23 bp, Homo sapiens
  source 1..23: mol_type = other DNA
cctatcctgctaggaatgtgtgg

SEQ ID NO: 946 - DNA, 23 bp, Homo sapiens
  source 1..23: mol_type = other DNA
ctcatcctgccaagatggaaggg

SEQ ID NO: 947 - DNA, 23 bp, Homo sapiens
  source 1..23: mol_type = other DNA
gaccatatgcccagaatgagtgg

SEQ ID NO: 948 - DNA, 23 bp, Homo sapiens
  source 1..23: mol_type = other DNA
tcacatctgccaaggatgagggg

SEQ ID NO: 949 - DNA, 21 bp, Homo sapiens
  source 1..21: mol_type = other DNA
gccaccctcccaaatcagggg

SEQ ID NO: 950 - DNA, 21 bp, Homo sapiens
  source 1..21: mol_type = other DNA
tcccctactaagaatgagggg

SEQ ID NO: 951 - DNA, 22 bp, Homo sapiens
  source 1..22: mol_type = other DNA
gtcatctgccaagaatgactga

SEQ ID NO: 952 - DNA, 21 bp, Homo sapiens
  source 1..21: mol_type = other DNA
gccacactcaagaatgaggtg

SEQ ID NO: 953 - DNA, 22 bp, Homo sapiens
  source 1..22: mol_type = other DNA
aggatcctgccaaaatgaggtg

SEQ ID NO: 954 - DNA, 23 bp, Homo sapiens
  source 1..23: mol_type = other DNA
gccatcctatcaagtgtgaagtg

SEQ ID NO: 955 - DNA, 22 bp, Homo sapiens
  source 1..22: mol_type = other DNA
gactcctgtcaaaaatgagaag

SEQ ID NO: 956 - DNA, 23 bp, Homo sapiens
  source 1..23: mol_type = other DNA
cccatcctgtaatgaatgacagg

SEQ ID NO: 957 - DNA, 22 bp, Homo sapiens
  source 1..22: mol_type = other DNA
tccaactgtcaggaatgagtgg

SEQ ID NO: 958 - DNA, 23 bp, Homo sapiens
  source 1..23: mol_type = other DNA
gacatggtatcaagaatgaggag

SEQ ID NO: 959 - DNA, 23 bp, Homo sapiens
  source 1..23: mol_type = other DNA
atcatcctgccaagtgaaagagg

SEQ ID NO: 960 - DNA, 23 bp, Homo sapiens
  source 1..23: mol_type = other DNA
tcctttatgccaagaaggagtgg

SEQ ID NO: 961 - DNA, 23 bp, Homo sapiens
  source 1..23: mol_type = other DNA
tccatcctgccaaaaagtaagtg

SEQ ID NO: 962 - DNA, 23 bp, Homo sapiens
  source 1..23: mol_type = other DNA
gccatccatgcaaaaatgtgagg

SEQ ID NO: 963 - DNA, 23 bp, Homo sapiens
  source 1..23: mol_type = other DNA
gccatccagccatcaatgagagg

SEQ ID NO: 964 - DNA, 22 bp, Homo sapiens
  source 1..22: mol_type = other DNA
cccatcccccaaaaatgagtgg

SEQ ID NO: 965 - DNA, 23 bp, Homo sapiens
  source 1..23: mol_type = other DNA
gccatcctgagaagaagaagggg

SEQ ID NO: 966 - DNA, 23 bp, Homo sapiens
  source 1..23: mol_type = other DNA
accatcctgccaagcatgtgagc

SEQ ID NO: 967 - DNA, 23 bp, Homo sapiens
  source 1..23: mol_type = other DNA
tccctcctgacaagaatgaaagg

SEQ ID NO: 968 - DNA, 23 bp, Homo sapiens
  source 1..23: mol_type = other DNA
gccatcctgtcatgaattagggc

SEQ ID NO: 969 - DNA, 23 bp, Homo sapiens
  source 1..23: mol_type = other DNA
ggtcccctaccaagaaggagagg

SEQ ID NO: 970 - DNA, 21 bp, Homo sapiens
  source 1..21: mol_type = other DNA
gccatcctaaaaaatgtgtgg

SEQ ID NO: 971 - DNA, 22 bp, Homo sapiens
  source 1..22: mol_type = other DNA
tgcagcctgcaagaatgagtgg

SEQ ID NO: 972 - DNA, 23 bp, Homo sapiens
  source 1..23: mol_type = other DNA
agcatcctgcctagaatgtgctg

SEQ ID NO: 973 - DNA, 23 bp, Homo sapiens
  source 1..23: mol_type = other DNA
gtccccctaccaagaatgagcac

SEQ ID NO: 974 - DNA, 23 bp, Homo sapiens
  source 1..23: mol_type = other DNA
cccatactgccaagaaatgtcgg

SEQ ID NO: 975 - DNA, 22 bp, Homo sapiens
  source 1..22: mol_type = other DNA
accatcctcaaagtatgagtgc

SEQ ID NO: 976 - DNA, 23 bp, Homo sapiens
  source 1..23: mol_type = other DNA
tgcttcctaccaagaataacagg

SEQ ID NO: 977 - DNA, 23 bp, Homo sapiens
  source 1..23: mol_type = other DNA
ccacacctgccaagaatgagcca

SEQ ID NO: 978 - DNA, 21 bp, Homo sapiens
  source 1..21: mol_type = other DNA
ggcactgccaggaatgagcag

SEQ ID NO: 979 - DNA, 23 bp, Homo sapiens
  source 1..23: mol_type = other DNA
tccattctgtcaagaatggtggg

SEQ ID NO: 980 - DNA, 21 bp, Homo sapiens
  source 1..21: mol_type = other DNA
tccaccttcaagaatgagggg

SEQ ID NO: 981 - DNA, 22 bp, Homo sapiens
  source 1..22: mol_type = other DNA
gccaactgccaggaaggagagg

SEQ ID NO: 982 - DNA, 21 bp, Homo sapiens
  source 1..21: mol_type = other DNA
ttcatcctcaagaatgaggtg

SEQ ID NO: 983 - DNA, 22 bp, Homo sapiens
  source 1..22: mol_type = other DNA
gacaccctgccataatgagggg

SEQ ID NO: 984 - DNA, 22 bp, Homo sapiens
  source 1..22: mol_type = other DNA
gccaacctgcaagagtgaaatg

SEQ ID NO: 985 - DNA, 22 bp, Homo sapiens
  source 1..22: mol_type = other DNA
gccaccctccaagaatgcgcgt

SEQ ID NO: 986 - DNA, 21 bp, Homo sapiens
  source 1..21: mol_type = other DNA
tccatcctgaagaatgaatag

SEQ ID NO: 987 - DNA, 24 bp, Homo sapiens
  source 1..24: mol_type = other DNA
gccatatctgccaagaatgcggag

SEQ ID NO: 988 - DNA, 21 bp, Homo sapiens
  source 1..21: mol_type = other DNA
gacactgacaagaatgatggg

SEQ ID NO: 989 - DNA, 23 bp, Homo sapiens
  source 1..23: mol_type = other DNA
atatttctgccaagaatgagaga

SEQ ID NO: 990 - DNA, 23 bp, Homo sapiens
  source 1..23: mol_type = other DNA
gctaccctgccagaaataagcgg

SEQ ID NO: 991 - DNA, 24 bp, Homo sapiens
  source 1..24: mol_type = other DNA
gacttccatgccaagaatgggtga

SEQ ID NO: 992 - DNA, 21 bp, Homo sapiens
  source 1..21: mol_type = other DNA
gcccatgccaacaatgatggg

SEQ ID NO: 993 - DNA, 22 bp, Homo sapiens
  source 1..22: mol_type = other DNA
gccacaggctaagaatgagtga

SEQ ID NO: 994 - DNA, 24 bp, Homo sapiens
  source 1..24: mol_type = other DNA
gaaatcctagccaaggatgaaggg

SEQ ID NO: 995 - DNA, 23 bp, Homo sapiens
  source 1..23: mol_type = other DNA
gacctactaccaaggatgagagc

SEQ ID NO: 996 - DNA, 22 bp, Homo sapiens
  source 1..22: mol_type = other DNA
tttatcctccaagaatgggagg

SEQ ID NO: 997 - DNA, 22 bp, Homo sapiens
  source 1..22: mol_type = other DNA
gccatcctgcaaatatgagaag

SEQ ID NO: 998 - DNA, 23 bp, Homo sapiens
  source 1..23: mol_type = other DNA
gccatgctgccaagaatgatggc

SEQ ID NO: 999 - DNA, 22 bp, Homo sapiens
  source 1..22: mol_type = other DNA
accatctgtcaagaatgagggc

SEQ ID NO: 1000 - DNA, 23 bp, Homo sapiens
  source 1..23: mol_type = other DNA
agtatcctgccaggaagaagggg

SEQ ID NO: 1001 - DNA, 23 bp, Homo sapiens
  source 1..23: mol_type = other DNA
cttttactgccaagaatgaaggg

SEQ ID NO: 1002 - DNA, 23 bp, Homo sapiens
  source 1..23: mol_type = other DNA
cagctcctactaagaatgagagg

SEQ ID NO: 1003 - DNA, 23 bp, Homo sapiens
  source 1..23: mol_type = other DNA
agccacctgccaagaaagaaagg

SEQ ID NO: 1004 - DNA, 23 bp, Homo sapiens
  source 1..23: mol_type = other DNA
gccatcataccaagaatgacttg

SEQ ID NO: 1005 - DNA, 21 bp, Homo sapiens
  source 1..21: mol_type = other DNA
cccatctccaagaatgaatgg

SEQ ID NO: 1006 - DNA, 23 bp, Homo sapiens
  source 1..23: mol_type = other DNA
tccttagtgccaagaatgaatgg

SEQ ID NO: 1007 - DNA, 23 bp, Homo sapiens
  source 1..23: mol_type = other DNA
gacttcataccaaggatgatggg

SEQ ID NO: 1008 - DNA, 24 bp, Homo sapiens
  source 1..24: mol_type = other DNA
gccatccttaacaagaatgaggca

SEQ ID NO: 1009 - DNA, 23 bp, Homo sapiens
  source 1..23: mol_type = other DNA
gatatcctcacaagaatgagtga

SEQ ID NO: 1010 - DNA, 23 bp, Homo sapiens
  source 1..23: mol_type = other DNA
tgcatcctgccaagaagaagaag

SEQ ID NO: 1011 - DNA, 21 bp, Homo sapiens
  source 1..21: mol_type = other DNA
gccatctgcaagaatgagctg

SEQ ID NO: 1012 - DNA, 21 bp, Homo sapiens
  source 1..21: mol_type = other DNA
gccatagccaaaaatgaatgg

SEQ ID NO: 1013 - DNA, 22 bp, Homo sapiens
  source 1..22: mol_type = other DNA
catatcctgccagaatgaggga

SEQ ID NO: 1014 - DNA, 24 bp, Homo sapiens
  source 1..24: mol_type = other DNA
tacatcctaccaaggaatcagagg

SEQ ID NO: 1015 - DNA, 23 bp, Homo sapiens
  source 1..23: mol_type = other DNA
catatcctgccaagaatgctgag

SEQ ID NO: 1016 - DNA, 23 bp, Homo sapiens
  source 1..23: mol_type = other DNA
tacatcctaccaagaatgaacca

SEQ ID NO: 1017 - DNA, 23 bp, Homo sapiens
  source 1..23: mol_type = other DNA
tgcatcctgccaggaatggagag

SEQ ID NO: 1018 - DNA, 23 bp, Homo sapiens
  source 1..23: mol_type = other DNA
ctaatcctgcaaagaatgatggt

SEQ ID NO: 1019 - DNA, 21 bp, Homo sapiens
  source 1..21: mol_type = other DNA
gccactgccaggaatgtgtgg

SEQ ID NO: 1020 - DNA, 23 bp, Homo sapiens
  source 1..23: mol_type = other DNA
ttcatactgccaagaatgacagg

SEQ ID NO: 1021 - DNA, 22 bp, Homo sapiens
  source 1..22: mol_type = other DNA
cacatcctgtcaagaagagggg

SEQ ID NO: 1022 - DNA, 22 bp, Homo sapiens
  source 1..22: mol_type = other DNA
accatccttcaaaaatgaaggg

SEQ ID NO: 1023 - DNA, 22 bp, Homo sapiens
  source 1..22: mol_type = other DNA
accatctaccaagcatgggtgg

SEQ ID NO: 1024 - DNA, 23 bp, Homo sapiens
  source 1..23: mol_type = other DNA
gccatcctaacaagagagaggtg

SEQ ID NO: 1025 - DNA, 23 bp, Homo sapiens
  source 1..23: mol_type = other DNA
gccattctaacaagaatgaggtg

SEQ ID NO: 1026 - DNA, 23 bp, Homo sapiens
  source 1..23: mol_type = other DNA
aacatccagccaaggatgagtga

SEQ ID NO: 1027 - DNA, 22 bp, Homo sapiens
  source 1..22: mol_type = other DNA
accctctaccatgaatgagagg

SEQ ID NO: 1028 - DNA, 23 bp, Homo sapiens
  source 1..23: mol_type = other DNA
gccatcctaccaagtaggaggtg

SEQ ID NO: 1029 - DNA, 23 bp, Homo sapiens
  source 1..23: mol_type = other DNA
accatcctaacaagtatgagatg

SEQ ID NO: 1030 - DNA, 22 bp, Homo sapiens
  source 1..22: mol_type = other DNA
accatccttcaaaaatgagaga

SEQ ID NO: 1031 - DNA, 23 bp, Homo sapiens
  source 1..23: mol_type = other DNA
gtgcttctaccaagaatgatagg

SEQ ID NO: 1032 - DNA, 21 bp, Homo sapiens
  source 1..21: mol_type = other DNA
gccatccaaaaggatgagggg

SEQ ID NO: 1033 - DNA, 22 bp, Homo sapiens
  source 1..22: mol_type = other DNA
gctatctaccaagaatgagagc

SEQ ID NO: 1034 - DNA, 21 bp, Homo sapiens
  source 1..21: mol_type = other DNA
gccatcttccagaatgagcag

SEQ ID NO: 1035 - DNA, 23 bp, Homo sapiens
  source 1..23: mol_type = other DNA
gccatcctgttaggaatgcagtg

SEQ ID NO: 1036 - DNA, 23 bp, Homo sapiens
  source 1..23: mol_type = other DNA
gccaccctgccaagtaggggtga

SEQ ID NO: 1037 - DNA, 23 bp, Homo sapiens
  source 1..23: mol_type = other DNA
tacatcctgccaagattgaaatg

SEQ ID NO: 1038 - DNA, 23 bp, Homo sapiens
  source 1..23: mol_type = other DNA
ttcatattgccaagaatgacagg

SEQ ID NO: 1039 - DNA, 23 bp, Homo sapiens
  source 1..23: mol_type = other DNA
cccactctgccaagtatgagagg

SEQ ID NO: 1040 - DNA, 23 bp, Homo sapiens
  source 1..23: mol_type = other DNA
gagtttatgccaagaatgagggt

SEQ ID NO: 1041 - DNA, 23 bp, Homo sapiens
  source 1..23: mol_type = other DNA
gccattcttacaagaataaggtg

SEQ ID NO: 1042 - DNA, 23 bp, Homo sapiens
  source 1..23: mol_type = other DNA
aggaacctaccaagaatgtgagg

SEQ ID NO: 1043 - DNA, 22 bp, Homo sapiens
  source 1..22: mol_type = other DNA
gagatcctgccaaaatgtgtgg

SEQ ID NO: 1044 - DNA, 23 bp, Homo sapiens
  source 1..23: mol_type = other DNA
ctaatcctgacaaggatgtgggg

SEQ ID NO: 1045 - DNA, 23 bp, Homo sapiens
  source 1..23: mol_type = other DNA
tccatccttccaagaatatgcag

SEQ ID NO: 1046 - DNA, 23 bp, Homo sapiens
  source 1..23: mol_type = other DNA
gccatcccaccaggaatgtcagg

SEQ ID NO: 1047 - DNA, 23 bp, Homo sapiens
  source 1..23: mol_type = other DNA
gagatcctaccaagaattgggag

SEQ ID NO: 1048 - DNA, 23 bp, Homo sapiens
  source 1..23: mol_type = other DNA
gccataccatcaataatgaaggg

SEQ ID NO: 1049 - DNA, 21 bp, Homo sapiens
  source 1..21: mol_type = other DNA
tccatccagccaaatgattgg

SEQ ID NO: 1050 - DNA, 23 bp, Homo sapiens
  source 1..23: mol_type = other DNA
gaggtaatgccaagaatgagtag

SEQ ID NO: 1051 - DNA, 22 bp, Homo sapiens
  source 1..22: mol_type = other DNA
accatcagctaagaatgaaagg

SEQ ID NO: 1052 - DNA, 23 bp, Homo sapiens
  source 1..23: mol_type = other DNA
gtataccttccaagaatgagtag

SEQ ID NO: 1053 - DNA, 22 bp, Homo sapiens
  source 1..22: mol_type = other DNA
gtcatccagaaaggatgagggg

SEQ ID NO: 1054 - DNA, 22 bp, Homo sapiens
  source 1..22: mol_type = other DNA
cacatccttgaagaatgagagg

SEQ ID NO: 1055 - DNA, 22 bp, Homo sapiens
  source 1..22: mol_type = other DNA
gccaccctgccagaaagaggag

SEQ ID NO: 1056 - DNA, 22 bp, Homo sapiens
  source 1..22: mol_type = other DNA
gacatccaccaagaaagagggg

SEQ ID NO: 1057 - DNA, 21 bp, Homo sapiens
  source 1..21: mol_type = other DNA
gcaatcatgaggaatgagggg

SEQ ID NO: 1058 - DNA, 23 bp, Homo sapiens
  source 1..23: mol_type = other DNA
ttcatcctgtcatgaatgaaagg

SEQ ID NO: 1059 - DNA, 24 bp, Homo sapiens
  source 1..24: mol_type = other DNA
gacaccctgccaagcaatgaggag

SEQ ID NO: 1060 - DNA, 23 bp, Homo sapiens
  source 1..23: mol_type = other DNA
ggcctactcccaagaatgaagga

SEQ ID NO: 1061 - DNA, 23 bp, Homo sapiens
  source 1..23: mol_type = other DNA
gccacaataccaagaatgagtga

SEQ ID NO: 1062 - DNA, 22 bp, Homo sapiens
  source 1..22: mol_type = other DNA
ttcatcctgcatgaatgagagt

SEQ ID NO: 1063 - DNA, 21 bp, Homo sapiens
  source 1..21: mol_type = other DNA
gtcatccacaagaatgaatgg

SEQ ID NO: 1064 - DNA, 22 bp, Homo sapiens
  source 1..22: mol_type = other DNA
gccatcctacaaaaatgtgatg

SEQ ID NO: 1065 - DNA, 22 bp, Homo sapiens
  source 1..22: mol_type = other DNA
gccatactatcaaaatgagagg

SEQ ID NO: 1066 - DNA, 22 bp, Homo sapiens
  source 1..22: mol_type = other DNA
gccataagccaagaaatagtgg

SEQ ID NO: 1067 - DNA, 23 bp, Homo sapiens
  source 1..23: mol_type = other DNA
gccatcctaacaaaaataaagtg

SEQ ID NO: 1068 - DNA, 21 bp, Homo sapiens
  source 1..21: mol_type = other DNA
gctctactgccaagaaagtgg

SEQ ID NO: 1069 - DNA, 22 bp, Homo sapiens
  source 1..22: mol_type = other DNA
gccatcctaccaagaagagtgc

SEQ ID NO: 1070 - DNA, 21 bp, Homo sapiens
  source 1..21: mol_type = other DNA
cccatcctcaagagtgaggag

SEQ ID NO: 1071 - DNA, 22 bp, Homo sapiens
  source 1..22: mol_type = other DNA
accatcccccaaaaatgagaga

SEQ ID NO: 1072 - DNA, 23 bp, Homo sapiens
  source 1..23: mol_type = other DNA
catctccagccaaggatgagagg

SEQ ID NO: 1073 - DNA, 22 bp, Homo sapiens
  source 1..22: mol_type = other DNA
gccatctaccaagaacgggggt

SEQ ID NO: 1074 - DNA, 23 bp, Homo sapiens
  source 1..23: mol_type = other DNA
tataagaaaaccagtgtctctgg

SEQ ID NO: 1075 - DNA, 23 bp, Homo sapiens
  source 1..23: mol_type = other DNA
aataggaagaccagtgaggaggc

SEQ ID NO: 1076 - DNA, 23 bp, Homo sapiens
  source 1..23: mol_type = other DNA
tgtagggacaccagtgagtagga

SEQ ID NO: 1077 - DNA, 23 bp, Homo sapiens
  source 1..23: mol_type = other DNA
aataggaaaaccagtgaaagcgg

SEQ ID NO: 1078 - DNA, 23 bp, Homo sapiens
  source 1..23: mol_type = other DNA
agtaggaaacacagtgagacagg

SEQ ID NO: 1079 - DNA, 22 bp, Homo sapiens
  source 1..22: mol_type = other DNA
tataagaaaccagagagctggg

SEQ ID NO: 1080 - DNA, 22 bp, Homo sapiens
  source 1..22: mol_type = other DNA
tataggtatccagtgagtagag

SEQ ID NO: 1081 - DNA, 22 bp, Homo sapiens
  source 1..22: mol_type = other DNA
agtaggacaaacagtgagctgg

SEQ ID NO: 1082 - DNA, 21 bp, Homo sapiens
  source 1..21: mol_type = other DNA
tgtagaaaaaccagtatcagg

SEQ ID NO: 1083 - DNA, 22 bp, Homo sapiens
  source 1..22: mol_type = other DNA
tataggataccagtgggtccga

SEQ ID NO: 1084 - DNA, 22 bp, Homo sapiens
  source 1..22: mol_type = other DNA
agtatgagaaccagtggtccgg

SEQ ID NO: 1085 - DNA, 23 bp, Homo sapiens
  source 1..23: mol_type = other DNA
tatagaaataccagttagtggga

SEQ ID NO: 1086 - DNA, 22 bp, Homo sapiens
  source 1..22: mol_type = other DNA
gatagaaaaaccaggagccagg

SEQ ID NO: 1087 - DNA, 24 bp, Homo sapiens
  source 1..24: mol_type = other DNA
tatacggagaaccagtgagtgagt

SEQ ID NO: 1088 - DNA, 22 bp, Homo sapiens
  source 1..22: mol_type = other DNA
tatagtaaaacagtgagtgcag

SEQ ID NO: 1089 - DNA, 23 bp, Homo sapiens
  source 1..23: mol_type = other DNA
tataggtaaagcagtaagtctgg

SEQ ID NO: 1090 - DNA, 23 bp, Homo sapiens
  source 1..23: mol_type = other DNA
aatatgtaaaccagtgaacaggg

SEQ ID NO: 1091 - DNA, 22 bp, Homo sapiens
  source 1..22: mol_type = other DNA
aggaggaaaacagtgagttagg

SEQ ID NO: 1092 - DNA, 23 bp, Homo sapiens
  source 1..23: mol_type = other DNA
catagaagaaccaatgagtcaga

SEQ ID NO: 1093 - DNA, 21 bp, Homo sapiens
  source 1..21: mol_type = other DNA
aataggacccagtgagtgtgg

SEQ ID NO: 1094 - DNA, 22 bp, Homo sapiens
  source 1..22: mol_type = other DNA
atgagtaaaaccaggagtctgg

SEQ ID NO: 1095 - DNA, 22 bp, Homo sapiens
  source 1..22: mol_type = other DNA
gagaggaaaaccaataatctgg

SEQ ID NO: 1096 - DNA, 23 bp, Homo sapiens
  source 1..23: mol_type = other DNA
aatagagaaaccagggagtccag

SEQ ID NO: 1097 - DNA, 23 bp, Homo sapiens
  source 1..23: mol_type = other DNA
aataataaaaccagtgaatgggt

SEQ ID NO: 1098 - DNA, 23 bp, Homo sapiens
  source 1..23: mol_type = other DNA
tataaggataccagtgatactgg

SEQ ID NO: 1099 - DNA, 23 bp, Homo sapiens
  source 1..23: mol_type = other DNA
aataggaaaaacagtaaccaggg

SEQ ID NO: 1100 - DNA, 22 bp, Homo sapiens
  source 1..22: mol_type = other DNA
tatataaaaccagtgggtgggc

SEQ ID NO: 1101 - DNA, 23 bp, Homo sapiens
  source 1..23: mol_type = other DNA
attatgaaaaccagtaagtagag

SEQ ID NO: 1102 - DNA, 23 bp, Homo sapiens
  source 1..23: mol_type = other DNA
tataggaaaacaaatgagttggt

SEQ ID NO: 1103 - DNA, 22 bp, Homo sapiens
  source 1..22: mol_type = other DNA
tagagaaaaccagtgtgttgga

SEQ ID NO: 1104 - DNA, 23 bp, Homo sapiens
  source 1..23: mol_type = other DNA
tataggaaatacagtgactgggg

SEQ ID NO: 1105 - DNA, 23 bp, Homo sapiens
  source 1..23: mol_type = other DNA
ttaaggaaaaaccatgagtcagg

SEQ ID NO: 1106 - DNA, 23 bp, Homo sapiens
  source 1..23: mol_type = other DNA
cttagtaaaagcagtgagtaggc

SEQ ID NO: 1107 - DNA, 23 bp, Homo sapiens
  source 1..23: mol_type = other DNA
aatagataaaccagggagtgggt

SEQ ID NO: 1108 - DNA, 23 bp, Homo sapiens
  source 1..23: mol_type = other DNA
caaagaaaaaccagtgagaagga

SEQ ID NO: 1109 - DNA, 23 bp, Homo sapiens
  source 1..23: mol_type = other DNA
ctaaggagaaccagtgattccgg

SEQ ID NO: 1110 - DNA, 22 bp, Homo sapiens
  source 1..22: mol_type = other DNA
gttaggaaaacagtgattcggc

SEQ ID NO: 1111 - DNA, 23 bp, Homo sapiens
  source 1..23: mol_type = other DNA
tctaagaaaaccagtcagtctgg

SEQ ID NO: 1112 - DNA, 23 bp, Homo sapiens
  source 1..23: mol_type = other DNA
tctaggaaaaacagtgagctgag

SEQ ID NO: 1113 - DNA, 23 bp, Homo sapiens
  source 1..23: mol_type = other DNA
tataagaataccagttagattgg

SEQ ID NO: 1114 - DNA, 22 bp, Homo sapiens
  source 1..22: mol_type = other DNA
tataagaagccactgaatcagg

SEQ ID NO: 1115 - DNA, 24 bp, Homo sapiens
  source 1..24: mol_type = other DNA
cagagttaaaaccagtgagtcagc

SEQ ID NO: 1116 - DNA, 22 bp, Homo sapiens
  source 1..22: mol_type = other DNA
aataggagaaccaatattcggg

SEQ ID NO: 1117 - DNA, 22 bp, Homo sapiens
  source 1..22: mol_type = other DNA
ccaaggagaaccagtgagctgg

SEQ ID NO: 1118 - DNA, 23 bp, Homo sapiens
  source 1..23: mol_type = other DNA
aatagacaaaacagtgagtcatg

SEQ ID NO: 1119 - DNA, 23 bp, Homo sapiens
  source 1..23: mol_type = other DNA
agtaggtacaccagtgaatcagg

SEQ ID NO: 1120 - DNA, 22 bp, Homo sapiens
  source 1..22: mol_type = other DNA
cataggtataccagggatcagg

SEQ ID NO: 1121 - DNA, 23 bp, Homo sapiens
  source 1..23: mol_type = other DNA
agtatgtaaaccaatgagtgtgg

SEQ ID NO: 1122 - DNA, 22 bp, Homo sapiens
  source 1..22: mol_type = other DNA
tataggataaccaagattcagg

SEQ ID NO: 1123 - DNA, 22 bp, Homo sapiens
  source 1..22: mol_type = other DNA
agaaggaaaaccagtaggcagg

SEQ ID NO: 1124 - DNA, 22 bp, Homo sapiens
  source 1..22: mol_type = other DNA
agtaggaaaaccaggagatagg

SEQ ID NO: 1125 - DNA, 22 bp, Homo sapiens
  source 1..22: mol_type = other DNA
aatataaaaaccattggtcagg

SEQ ID NO: 1126 - DNA, 23 bp, Homo sapiens
  source 1..23: mol_type = other DNA
tatagggtaaccagggagattgg

SEQ ID NO: 1127 - DNA, 23 bp, Homo sapiens
  source 1..23: mol_type = other DNA
tgtaggaaaaccagttacaaggt

SEQ ID NO: 1128 - DNA, 22 bp, Homo sapiens
  source 1..22: mol_type = other DNA
tgtaagaacacagtgaatctgg

SEQ ID NO: 1129 - DNA, 23 bp, Homo sapiens
  source 1..23: mol_type = other DNA
ttacagcaaaccagtgagtgggg

SEQ ID NO: 1130 - DNA, 22 bp, Homo sapiens
  source 1..22: mol_type = other DNA
gacaggaaaccagtgagtctgt

SEQ ID NO: 1131 - DNA, 23 bp, Homo sapiens
  source 1..23: mol_type = other DNA
tattagaaaactaatgagtagga

SEQ ID NO: 1132 - DNA, 23 bp, Homo sapiens
  source 1..23: mol_type = other DNA
ttcagggaaaccaatgagtcatg

SEQ ID NO: 1133 - DNA, 21 bp, Homo sapiens
  source 1..21: mol_type = other DNA
gctaggaaaaccagagactgg

SEQ ID NO: 1134 - DNA, 23 bp, Homo sapiens
  source 1..23: mol_type = other DNA
tattgaaaaaccaatgagtcaaa

SEQ ID NO: 1135 - DNA, 23 bp, Homo sapiens
  source 1..23: mol_type = other DNA
ttggggaaagccaatgagtcggg

SEQ ID NO: 1136 - DNA, 23 bp, Homo sapiens
  source 1..23: mol_type = other DNA
tataggagtaccagtggtcctga

SEQ ID NO: 1137 - DNA, 22 bp, Homo sapiens
  source 1..22: mol_type = other DNA
tataagaaaatagtgagtaggc

SEQ ID NO: 1138 - DNA, 22 bp, Homo sapiens
  source 1..22: mol_type = other DNA
tatgaggaaaccaggagacagg

SEQ ID NO: 1139 - DNA, 22 bp, Homo sapiens
  source 1..22: mol_type = other DNA
cctaggagacccagtgatctgg

SEQ ID NO: 1140 - DNA, 22 bp, Homo sapiens
  source 1..22: mol_type = other DNA
tgttggaaaccagtgattcagg

SEQ ID NO: 1141 - DNA, 22 bp, Homo sapiens
  source 1..22: mol_type = other DNA
tactgtacaaccagtagtcagg

SEQ ID NO: 1142 - DNA, 22 bp, Homo sapiens
  source 1..22: mol_type = other DNA
aatagaaaaaccaggagaaggg

SEQ ID NO: 1143 - DNA, 23 bp, Homo sapiens
  source 1..23: mol_type = other DNA
tatagagaaacaagagagtccag

SEQ ID NO: 1144 - DNA, 23 bp, Homo sapiens
  source 1..23: mol_type = other DNA
tataggaaaacaagggagaccgg

SEQ ID NO: 1145 - DNA, 23 bp, Homo sapiens
  source 1..23: mol_type = other DNA
tataataaaaccagtatgtcaga

SEQ ID NO: 1146 - DNA, 23 bp, Homo sapiens
  source 1..23: mol_type = other DNA
tataaggacaccagtaatactgg

SEQ ID NO: 1147 - DNA, 23 bp, Homo sapiens
  source 1..23: mol_type = other DNA
tggggggaaaccagtgagccggg

SEQ ID NO: 1148 - DNA, 23 bp, Homo sapiens
  source 1..23: mol_type = other DNA
aaaagggaagccagtgagtcgga

SEQ ID NO: 1149 - DNA, 23 bp, Homo sapiens
  source 1..23: mol_type = other DNA
gatgggaaaaccagttagcaggt

SEQ ID NO: 1150 - DNA, 23 bp, Homo sapiens
  source 1..23: mol_type = other DNA
cagaggaagtccagtgagtgggg

SEQ ID NO: 1151 - DNA, 22 bp, Homo sapiens
  source 1..22: mol_type = other DNA
gatagaaagccagtgagtgaga

SEQ ID NO: 1152 - DNA, 23 bp, Homo sapiens
  source 1..23: mol_type = other DNA
ttgttgaaaaccagtgagacagg

SEQ ID NO: 1153 - DNA, 23 bp, Homo sapiens
  source 1..23: mol_type = other DNA
tgtaggtaaccttttgagtcagg

SEQ ID NO: 1154 - DNA, 23 bp, Homo sapiens
  source 1..23: mol_type = other DNA
ttcaagaaagccagtgatccggg

SEQ ID NO: 1155 - DNA, 23 bp, Homo sapiens
  source 1..23: mol_type = other DNA
aataggaagaccagtgactctgc

SEQ ID NO: 1156 - DNA, 22 bp, Homo sapiens
  source 1..22: mol_type = other DNA
aatagtaaagccagtggtaagg

SEQ ID NO: 1157 - DNA, 23 bp, Homo sapiens
  source 1..23: mol_type = other DNA
tactagaaaaccagagagcaggg

SEQ ID NO: 1158 - DNA, 23 bp, Homo sapiens
  source 1..23: mol_type = other DNA
aagaggaaaaaccatgagtatgg

SEQ ID NO: 1159 - DNA, 22 bp, Homo sapiens
  source 1..22: mol_type = other DNA
tacataaaaccagtgagatagg

SEQ ID NO: 1160 - DNA, 22 bp, Homo sapiens
  source 1..22: mol_type = other DNA
aatagaaaaccagtaagttgag

SEQ ID NO: 1161 - DNA, 23 bp, Homo sapiens
  source 1..23: mol_type = other DNA
gataagaaaatcagtggttctgg

SEQ ID NO: 1162 - DNA, 22 bp, Homo sapiens
  source 1..22: mol_type = other DNA
tgtagaataacagtgagtttgg

SEQ ID NO: 1163 - DNA, 23 bp, Homo sapiens
  source 1..23: mol_type = other DNA
aaatacaaaaccagtgaggctgg

SEQ ID NO: 1164 - DNA, 23 bp, Homo sapiens
  source 1..23: mol_type = other DNA
tcaaggaataccagtgatttcgg

SEQ ID NO: 1165 - DNA, 23 bp, Homo sapiens
  source 1..23: mol_type = other DNA
taaaggaaaaccagtgtgtgcag

SEQ ID NO: 1166 - DNA, 22 bp, Homo sapiens
  source 1..22: mol_type = other DNA
aatgggaaaaccaggtttcagg

SEQ ID NO: 1167 - DNA, 22 bp, Homo sapiens
  source 1..22: mol_type = other DNA
tgaagtaaaaccagtactcagg

SEQ ID NO: 1168 - DNA, 23 bp, Homo sapiens
  source 1..23: mol_type = other DNA
tataagaaaaccaggaaattggg

SEQ ID NO: 1169 - DNA, 22 bp, Homo sapiens
  source 1..22: mol_type = other DNA
cataggaaactagtgactctga

SEQ ID NO: 1170 - DNA, 23 bp, Homo sapiens
  source 1..23: mol_type = other DNA
tatagaaaattcagtgactcagg

SEQ ID NO: 1171 - DNA, 23 bp, Homo sapiens
  source 1..23: mol_type = other DNA
tatagaaaaagcagtggctctgg

SEQ ID NO: 1172 - DNA, 22 bp, Homo sapiens
  source 1..22: mol_type = other DNA
tataggaaaagcaggagagagg

SEQ ID NO: 1173 - DNA, 22 bp, Homo sapiens
  source 1..22: mol_type = other DNA
tgtagaaaaccagtgaagcagg

SEQ ID NO: 1174 - DNA, 23 bp, Homo sapiens
  source 1..23: mol_type = other DNA
aatcagaaaccctgggagtcagg

SEQ ID NO: 1175 - DNA, 23 bp, Homo sapiens
  source 1..23: mol_type = other DNA
tgtaggaaagccggtgaagtggg

SEQ ID NO: 1176 - DNA, 23 bp, Homo sapiens
  source 1..23: mol_type = other DNA
tatagagaaaccagtgcacctgg

SEQ ID NO: 1177 - DNA, 22 bp, Homo sapiens
  source 1..22: mol_type = other DNA
tataggaatccagtaagaatgg

SEQ ID NO: 1178 - DNA, 22 bp, Homo sapiens
  source 1..22: mol_type = other DNA
tatagtaaaactaatgatcaga

SEQ ID NO: 1179 - DNA, 23 bp, Homo sapiens
  source 1..23: mol_type = other DNA
aataggaagaccagttaggaggc

SEQ ID NO: 1180 - DNA, 23 bp, Homo sapiens
  source 1..23: mol_type = other DNA
tgtaggtgaaccagtggttctag

SEQ ID NO: 1181 - DNA, 22 bp, Homo sapiens
  source 1..22: mol_type = other DNA
cagtggaaaaccagagagcagg

SEQ ID NO: 1182 - DNA, 22 bp, Homo sapiens
  source 1..22: mol_type = other DNA
taaaggcaaaccaatgatcagg

SEQ ID NO: 1183 - DNA, 23 bp, Homo sapiens
  source 1..23: mol_type = other DNA
tcagtggataccagtgagtctgg

SEQ ID NO: 1184 - DNA, 22 bp, Homo sapiens
  source 1..22: mol_type = other DNA
tatctacaaccagtgagcctgg

SEQ ID NO: 1185 - DNA, 22 bp, Homo sapiens
  source 1..22: mol_type = other DNA
tagataacaccagtgagtgggg

SEQ ID NO: 1186 - DNA, 22 bp, Homo sapiens
  source 1..22: mol_type = other DNA
gagaagaaaacagtgagccagg

SEQ ID NO: 1187 - DNA, 23 bp, Homo sapiens
  source 1..23: mol_type = other DNA
aatagaaaaatcagtgagtctga

SEQ ID NO: 1188 - DNA, 23 bp, Homo sapiens
  source 1..23: mol_type = other DNA
gattctaagaccagtgagtaggg

SEQ ID NO: 1189 - DNA, 24 bp, Homo sapiens
  source 1..24: mol_type = other DNA
agtaggaaaacccaatgagtgagg

SEQ ID NO: 1190 - DNA, 23 bp, Homo sapiens
  source 1..23: mol_type = other DNA
cctctcaataccagtgagtcagg

SEQ ID NO: 1191 - DNA, 22 bp, Homo sapiens
  source 1..22: mol_type = other DNA
tatagcaaaccagagagctggg

SEQ ID NO: 1192 - DNA, 22 bp, Homo sapiens
  source 1..22: mol_type = other DNA
tctactaaaacagtgagtctgg

SEQ ID NO: 1193 - DNA, 23 bp, Homo sapiens
  source 1..23: mol_type = other DNA
atcagggaaaccagtgaatctgg

SEQ ID NO: 1194 - DNA, 22 bp, Homo sapiens
  source 1..22: mol_type = other DNA
tctatcaaaaccagtagtctag

SEQ ID NO: 1195 - DNA, 23 bp, Homo sapiens
  source 1..23: mol_type = other DNA
tataggaatgctagtgatttttg

SEQ ID NO: 1196 - DNA, 23 bp, Homo sapiens
  source 1..23: mol_type = other DNA
cacaggaaaatcagtgagttgaa

SEQ ID NO: 1197 - DNA, 23 bp, Homo sapiens
  source 1..23: mol_type = other DNA
tttatggaaaccaatgagtcaat

SEQ ID NO: 1198 - DNA, 23 bp, Homo sapiens
  source 1..23: mol_type = other DNA
gaaaagaaaaccagagaggcagg

SEQ ID NO: 1199 - DNA, 22 bp, Homo sapiens
  source 1..22: mol_type = other DNA
tgtagagaaccactgaggcagg

SEQ ID NO: 1200 - DNA, 22 bp, Homo sapiens
  source 1..22: mol_type = other DNA
tctagaaaaaccatgagccagg

SEQ ID NO: 1201 - DNA, 22 bp, Homo sapiens
  source 1..22: mol_type = other DNA
tgtgagaaaaacaggagtcagg

SEQ ID NO: 1202 - DNA, 22 bp, Homo sapiens
  source 1..22: mol_type = other DNA
taaggataaccaatggttctgg

SEQ ID NO: 1203 - DNA, 22 bp, Homo sapiens
  source 1..22: mol_type = other DNA
cagaagaaaaccaggaggcagg

SEQ ID NO: 1204 - DNA, 22 bp, Homo sapiens
  source 1..22: mol_type = other DNA
tataggagggccagtgatatgg

SEQ ID NO: 1205 - DNA, 23 bp, Homo sapiens
  source 1..23: mol_type = other DNA
tattggataaccagtggtacagg

SEQ ID NO: 1206 - DNA, 23 bp, Homo sapiens
  source 1..23: mol_type = other DNA
tttaggaaaaccagggggaatgg

SEQ ID NO: 1207 - DNA, 23 bp, Homo sapiens
  source 1..23: mol_type = other DNA
tagggggaagccagtgagccagg

SEQ ID NO: 1208 - DNA, 23 bp, Homo sapiens
  source 1..23: mol_type = other DNA
tatatctaaaccagtgatttggc

SEQ ID NO: 1209 - DNA, 23 bp, Homo sapiens
  source 1..23: mol_type = other DNA
agtagcagaatcagtgagtgggg

SEQ ID NO: 1210 - DNA, 23 bp, Homo sapiens
  source 1..23: mol_type = other DNA
tgtaggcaaaacagagattcagg

SEQ ID NO: 1211 - DNA, 23 bp, Homo sapiens
  source 1..23: mol_type = other DNA
taaaggaaacactgagagccagg

SEQ ID NO: 1212 - DNA, 23 bp, Homo sapiens
  source 1..23: mol_type = other DNA
cttcagaaaaacagtgagtctag

SEQ ID NO: 1213 - DNA, 23 bp, Homo sapiens
  source 1..23: mol_type = other DNA
gagaagaaagccggtgagtcggg

SEQ ID NO: 1214 - DNA, 23 bp, Homo sapiens
  source 1..23: mol_type = other DNA
tttcttaaaaccagtggttcagg

SEQ ID NO: 1215 - DNA, 23 bp, Homo sapiens
  source 1..23: mol_type = other DNA
gaagtgaagaccagtgagtctag

SEQ ID NO: 1216 - DNA, 23 bp, Homo sapiens
  source 1..23: mol_type = other DNA
aataggaaaaccagtcaggcgtg

SEQ ID NO: 1217 - DNA, 23 bp, Homo sapiens
  source 1..23: mol_type = other DNA
tatagcaaagccactgatttgtg

SEQ ID NO: 1218 - DNA, 22 bp, Homo sapiens
  source 1..22: mol_type = other DNA
gataagaaaaccattgatcaga

SEQ ID NO: 1219 - DNA, 22 bp, Homo sapiens
  source 1..22: mol_type = other DNA
aataggaaaacagagagaaggg

SEQ ID NO: 1220 - DNA, 22 bp, Homo sapiens
  source 1..22: mol_type = other DNA
tagaggaaaacagtgagtgctt

SEQ ID NO: 1221 - DNA, 23 bp, Homo sapiens
  source 1..23: mol_type = other DNA
tttgggaagaccagagattcatg

SEQ ID NO: 1222 - DNA, 23 bp, Homo sapiens
  source 1..23: mol_type = other DNA
agtaggaaaaacagagagttaag

SEQ ID NO: 1223 - DNA, 23 bp, Homo sapiens
  source 1..23: mol_type = other DNA
tataggtaaacttgtgacttggg

SEQ ID NO: 1224 - DNA, 23 bp, Homo sapiens
  source 1..23: mol_type = other DNA
tagaaaaaaatcagtgagtcagg

SEQ ID NO: 1225 - DNA, 23 bp, Homo sapiens
  source 1..23: mol_type = other DNA
attaggagaaacagtgagtgagg

SEQ ID NO: 1226 - DNA, 23 bp, Homo sapiens
  source 1..23: mol_type = other DNA
tatagaaacaccagttagtaaga

SEQ ID NO: 1227 - DNA, 23 bp, Homo sapiens
  source 1..23: mol_type = other DNA
cttatgaagacctgagagtcagg

SEQ ID NO: 1228 - DNA, 22 bp, Homo sapiens
  source 1..22: mol_type = other DNA
tatagggaaaccagtaatctca

SEQ ID NO: 1229 - DNA, 22 bp, Homo sapiens
  source 1..22: mol_type = other DNA
tctaggagaatcagtaagcagg

SEQ ID NO: 1230 - DNA, 22 bp, Homo sapiens
  source 1..22: mol_type = other DNA
gacaggagaaccatgagcctgg

SEQ ID NO: 1231 - DNA, 22 bp, Homo sapiens
  source 1..22: mol_type = other DNA
gataggaaaaccatgatccaga

SEQ ID NO: 1232 - DNA, 22 bp, Homo sapiens
  source 1..22: mol_type = other DNA
cataggtaaaacagggagcagg

SEQ ID NO: 1233 - DNA, 21 bp, Homo sapiens
  source 1..21: mol_type = other DNA
aatagtaaacagtgagtcaag

SEQ ID NO: 1234 - DNA, 23 bp, Homo sapiens
  source 1..23: mol_type = other DNA
cataggaataccagtgattggtc

SEQ ID NO: 1235 - DNA, 23 bp, Homo sapiens
  source 1..23: mol_type = other DNA
tctgggaagaccagtgagtgaaa

SEQ ID NO: 1236 - DNA, 23 bp, Homo sapiens
  source 1..23: mol_type = other DNA
tgtaggaaagccagtgtaggcgg

SEQ ID NO: 1237 - DNA, 23 bp, Homo sapiens
  source 1..23: mol_type = other DNA
tatataaaaatcagtgagcctgg

SEQ ID NO: 1238 - DNA, 23 bp, Homo sapiens
  source 1..23: mol_type = other DNA
agagggtaaacgagtgagtctgg

SEQ ID NO: 1239 - DNA, 23 bp, Homo sapiens
  source 1..23: mol_type = other DNA
tactggaacaccagtgaggaggc

SEQ ID NO: 1240 - DNA, 23 bp, Homo sapiens
  source 1..23: mol_type = other DNA
taaaggaaaaccagtcaggaggc

SEQ ID NO: 1241 - DNA, 23 bp, Homo sapiens
  source 1..23: mol_type = other DNA
tatatgaaaaacagtgagtatgt

SEQ ID NO: 1242 - DNA, 24 bp, Homo sapiens
  source 1..24: mol_type = other DNA
tataggaaaagcaagtgtgtatgt

SEQ ID NO: 1243 - DNA, 22 bp, Homo sapiens
  source 1..22: mol_type = other DNA
taaggaaaatcagtgaacacgg

SEQ ID NO: 1244 - DNA, 21 bp, Homo sapiens
  source 1..21: mol_type = other DNA
aataggaaacagtaaatctgg

SEQ ID NO: 1245 - DNA, 21 bp, Homo sapiens
  source 1..21: mol_type = other DNA
tataaggacaccagtgactgg

SEQ ID NO: 1246 - DNA, 21 bp, Homo sapiens
  source 1..21: mol_type = other DNA
tataggaatacctgaggctgg

SEQ ID NO: 1247 - DNA, 23 bp, Homo sapiens
  source 1..23: mol_type = other DNA
tataggtaaacttctgggccagg

SEQ ID NO: 1248 - DNA, 23 bp, Homo sapiens
  source 1..23: mol_type = other DNA
tggaaggaagccagtgagccagg

SEQ ID NO: 1249 - DNA, 23 bp, Homo sapiens
  source 1..23: mol_type = other DNA
tttaggaagatcagtggctcacg

SEQ ID NO: 1250 - DNA, 23 bp, Homo sapiens
  source 1..23: mol_type = other DNA
tgtagtaaaaacagtgaccaagg

SEQ ID NO: 1251 - DNA, 23 bp, Homo sapiens
  source 1..23: mol_type = other DNA
tagaggaaaaggattgagggagg

SEQ ID NO: 1252 - DNA, 23 bp, Homo sapiens
  source 1..23: mol_type = other DNA
tatatgaaagccatagagtcaag

SEQ ID NO: 1253 - DNA, 23 bp, Homo sapiens
  source 1..23: mol_type = other DNA
tatactattaccagtgagttttg

SEQ ID NO: 1254 - DNA, 22 bp, Homo sapiens
  source 1..22: mol_type = other DNA
catagaaaaccagtgagtttca

SEQ ID NO: 1255 - DNA, 22 bp, Homo sapiens
  source 1..22: mol_type = other DNA
tataggaaaacagagtatccag

SEQ ID NO: 1256 - DNA, 22 bp, Homo sapiens
  source 1..22: mol_type = other DNA
tataagaaaagcatcagacagg

SEQ ID NO: 1257 - DNA, 22 bp, Homo sapiens
  source 1..22: mol_type = other DNA
tagatgaaaaccagtgatgaga

SEQ ID NO: 1258 - DNA, 22 bp, Homo sapiens
  source 1..22: mol_type = other DNA
aataggaaaccattgggtgggg

SEQ ID NO: 1259 - DNA, 22 bp, Homo sapiens
  source 1..22: mol_type = other DNA
tataggtaaaccatgtgtaggt

SEQ ID NO: 1260 - DNA, 22 bp, Homo sapiens
  source 1..22: mol_type = other DNA
attaggaaaaccagtgatcaat

SEQ ID NO: 1261 - DNA, 21 bp, Homo sapiens
  source 1..21: mol_type = other DNA
tataggaatcagagcgtctgg

SEQ ID NO: 1262 - DNA, 23 bp, Homo sapiens
  source 1..23: mol_type = other DNA
tctcagaaaacaagtgagtgctg

SEQ ID NO: 1263 - DNA, 23 bp, Homo sapiens
  source 1..23: mol_type = other DNA
cataaggacaccagtgatactgg

SEQ ID NO: 1264 - DNA, 23 bp, Homo sapiens
  source 1..23: mol_type = other DNA
ggctggaaaaccagttagtccag

SEQ ID NO: 1265 - DNA, 23 bp, Homo sapiens
  source 1..23: mol_type = other DNA
aataggaagagcactgaatttgg

SEQ ID NO: 1266 - DNA, 23 bp, Homo sapiens
  source 1..23: mol_type = other DNA
tataggaatactagtgatttttg

SEQ ID NO: 1267 - DNA, 23 bp, Homo sapiens
  source 1..23: mol_type = other DNA
aaaacaaaaaacagtgagtccag

SEQ ID NO: 1268 - DNA, 23 bp, Homo sapiens
  source 1..23: mol_type = other DNA
taaaagaaaaccagagaatatag

SEQ ID NO: 1269 - DNA, 23 bp, Homo sapiens
  source 1..23: mol_type = other DNA
tatatctaaaacagtgagccagg

SEQ ID NO: 1270 - DNA, 23 bp, Homo sapiens
  source 1..23: mol_type = other DNA
tcttgcatatccagtgagtatgg

SEQ ID NO: 1271 - DNA, 23 bp, Homo sapiens
  source 1..23: mol_type = other DNA
aatacgaaaaccagtcaggtgtg

SEQ ID NO: 1272 - DNA, 23 bp, Homo sapiens
  source 1..23: mol_type = other DNA
tattatataaacattgagtcagg

SEQ ID NO: 1273 - DNA, 23 bp, Homo sapiens
  source 1..23: mol_type = other DNA
cctaggaaaaccagagaccctgt

SEQ ID NO: 1274 - DNA, 25 bp, Homo sapiens
  source 1..25: mol_type = other DNA
tataggagtgaaccacagtgtctgg

SEQ ID NO: 1275 - DNA, 22 bp, Homo sapiens
  source 1..22: mol_type = other DNA
taaaggaaacttgggagtcagg

SEQ ID NO: 1276 - DNA, 22 bp, Homo sapiens
  source 1..22: mol_type = other DNA
tacaggagaccccggagtcagg

SEQ ID NO: 1277 - DNA, 21 bp, Homo sapiens
  source 1..21: mol_type = other DNA
taaaggaatacctgagtctgg

SEQ ID NO: 1278 - DNA, 22 bp, Homo sapiens
  source 1..22: mol_type = other DNA
tataggaaaagattgaatccgg

SEQ ID NO: 1279 - DNA, 21 bp, Homo sapiens
  source 1..21: mol_type = other DNA
tatagtaaaaccagaagctgg

SEQ ID NO: 1280 - DNA, 22 bp, Homo sapiens
  source 1..22: mol_type = other DNA
tatagtgaaccagtgaggcagg

SEQ ID NO: 1281 - DNA, 23 bp, Homo sapiens
  source 1..23: mol_type = other DNA
taataggaaaccagtgactcaag

SEQ ID NO: 1282 - DNA, 22 bp, Homo sapiens
  source 1..22: mol_type = other DNA
cataagaaaaccagtattcagg

SEQ ID NO: 1283 - DNA, 23 bp, Homo sapiens
  source 1..23: mol_type = other DNA
catagtcaaatcagtgagttggt

SEQ ID NO: 1284 - DNA, 22 bp, Homo sapiens
  source 1..22: mol_type = other DNA
actaggaaaaccataagtcagg

SEQ ID NO: 1285 - DNA, 22 bp, Homo sapiens
  source 1..22: mol_type = other DNA
tatatgaaaactaatgatcagg

SEQ ID NO: 1286 - DNA, 22 bp, Homo sapiens
  source 1..22: mol_type = other DNA
tatagataaaccagtgatcaga

SEQ ID NO: 1287 - DNA, 23 bp, Homo sapiens
  source 1..23: mol_type = other DNA
tataagagaaccagtgagttaga

SEQ ID NO: 1288 - DNA, 23 bp, Homo sapiens
  source 1..23: mol_type = other DNA
aatatggaaaccagtgagtagaa

SEQ ID NO: 1289 - DNA, 23 bp, Homo sapiens
  source 1..23: mol_type = other DNA
tataggaataccactgagtcctg

SEQ ID NO: 1290 - DNA, 22 bp, Homo sapiens
  source 1..22: mol_type = other DNA
cataggaggccagtgagtcaag

SEQ ID NO: 1291 - DNA, 23 bp, Homo sapiens
  source 1..23: mol_type = other DNA
aagaggaaaaccagtaattcagg

SEQ ID NO: 1292 - DNA, 22 bp, Homo sapiens
  source 1..22: mol_type = other DNA
tatagtctaccagtgagtcagg

SEQ ID NO: 1293 - DNA, 23 bp, Homo sapiens
  source 1..23: mol_type = other DNA
tatagcaaaaccagagagtagag

SEQ ID NO: 1294 - DNA, 22 bp, Homo sapiens
  source 1..22: mol_type = other DNA
cataggagaccagtgattcaga

SEQ ID NO: 1295 - DNA, 23 bp, Homo sapiens
  source 1..23: mol_type = other DNA
tatagacaaaccagagagtttgg

SEQ ID NO: 1296 - DNA, 22 bp, Homo sapiens
  source 1..22: mol_type = other DNA
tacaggaaaccagtgactcgga

SEQ ID NO: 1297 - DNA, 22 bp, Homo sapiens
  source 1..22: mol_type = other DNA
tgtaggaagccagtgaggcctg

SEQ ID NO: 1298 - DNA, 22 bp, Homo sapiens
  source 1..22: mol_type = other DNA
tagaggaaaaccatgcatcagg

SEQ ID NO: 1299 - DNA, 22 bp, Homo sapiens
  source 1..22: mol_type = other DNA
tataggaatacccatgatctgg

SEQ ID NO: 1300 - DNA, 23 bp, Homo sapiens
  source 1..23: mol_type = other DNA
tctatagtaaccagtaagtctgg

SEQ ID NO: 1301 - DNA, 23 bp, Homo sapiens
  source 1..23: mol_type = other DNA
aataagaaagccagtgagactgg

SEQ ID NO: 1302 - DNA, 23 bp, Homo sapiens
  source 1..23: mol_type = other DNA
tataggaataacagtgagagtgg

SEQ ID NO: 1303 - DNA, 23 bp, Homo sapiens
  source 1..23: mol_type = other DNA
tatagataagccagtgaatgggc

SEQ ID NO: 1304 - DNA, 23 bp, Homo sapiens
  source 1..23: mol_type = other DNA
tagaagaaaaccagtgagtatca

SEQ ID NO: 1305 - DNA, 24 bp, Homo sapiens
  source 1..24: mol_type = other DNA
aataggaaaaccaggtgaggcggg

SEQ ID NO: 1306 - DNA, 23 bp, Homo sapiens
  source 1..23: mol_type = other DNA
aataggaaaaccagttaggaggt

SEQ ID NO: 1307 - DNA, 23 bp, Homo sapiens
  source 1..23: mol_type = other DNA
aataggaaatccagtgaaatgga

SEQ ID NO: 1308 - DNA, 23 bp, Homo sapiens
  source 1..23: mol_type = other DNA
agaaagaaaaccagtgagcccag

SEQ ID NO: 1309 - DNA, 23 bp, Homo sapiens
  source 1..23: mol_type = other DNA
tataaggacaccagtgatactgg

SEQ ID NO: 1310 - DNA, 22 bp, Homo sapiens
  source 1..22: mol_type = other DNA
tatgcaaaaccagtgagctgga

SEQ ID NO: 1311 - DNA, 23 bp, Homo sapiens
  source 1..23: mol_type = other DNA
tagctgaaaaccagtgattagga

SEQ ID NO: 1312 - DNA, 23 bp, Homo sapiens
  source 1..23: mol_type = other DNA
tacagaaaaaccagtgattcaga

SEQ ID NO: 1313 - DNA, 22 bp, Homo sapiens
  source 1..22: mol_type = other DNA
tttaaaaaaccagagagttagg

SEQ ID NO: 1314 - DNA, 23 bp, Homo sapiens
  source 1..23: mol_type = other DNA
aataggaaaaccagtaaaaaagg

SEQ ID NO: 1315 - DNA, 22 bp, Homo sapiens
  source 1..22: mol_type = other DNA
tttaggaaaaacagtattcagg

SEQ ID NO: 1316 - DNA, 24 bp, Homo sapiens
  source 1..24: mol_type = other DNA
tgtagaaaaaatcagtgagtcagg

SEQ ID NO: 1317 - DNA, 24 bp, Homo sapiens
  source 1..24: mol_type = other DNA
gataggaaaacacagtgagttcag

SEQ ID NO: 1318 - DNA, 23 bp, Homo sapiens
  source 1..23: mol_type = other DNA
tttaagaaaaccaatgagtcagt

SEQ ID NO: 1319 - DNA, 22 bp, Homo sapiens
  source 1..22: mol_type = other DNA
catagggaaacagtgagacagg

SEQ ID NO: 1320 - DNA, 22 bp, Homo sapiens
  source 1..22: mol_type = other DNA
gatagaaaaccagtgaccaggg

SEQ ID NO: 1321 - DNA, 23 bp, Homo sapiens
  source 1..23: mol_type = other DNA
tatcagaaaaccagggagtggga

SEQ ID NO: 1322 - DNA, 23 bp, Homo sapiens
  source 1..23: mol_type = other DNA
cagtggaaaatcagtgagtcaag

SEQ ID NO: 1323 - DNA, 23 bp, Homo sapiens
  source 1..23: mol_type = other DNA
tacaagaaaaccagtggtctagg

SEQ ID NO: 1324 - DNA, 23 bp, Homo sapiens
  source 1..23: mol_type = other DNA
tacaggaacaccagtgagtgtgt

SEQ ID NO: 1325 - DNA, 21 bp, Homo sapiens
  source 1..21: mol_type = other DNA
tgtaggtaatagtgagtcagg

SEQ ID NO: 1326 - DNA, 23 bp, Homo sapiens
  source 1..23: mol_type = other DNA
gtgtggaaaatcagtgagtcaga

SEQ ID NO: 1327 - DNA, 22 bp, Homo sapiens
  source 1..22: mol_type = other DNA
tatagggcaaccagtagtctga

SEQ ID NO: 1328 - DNA, 22 bp, Homo sapiens
  source 1..22: mol_type = other DNA
tataggaatacagtgagtttga

SEQ ID NO: 1329 - DNA, 22 bp, Homo sapiens
  source 1..22: mol_type = other DNA
tataggaaagcagtgaggacgg

SEQ ID NO: 1330 - DNA, 22 bp, Homo sapiens
  source 1..22: mol_type = other DNA
catagggaaactagtggtaggg

SEQ ID NO: 1331 - DNA, 22 bp, Homo sapiens
  source 1..22: mol_type = other DNA
aactggaaaaccagtggtcaag

SEQ ID NO: 1332 - DNA, 23 bp, Homo sapiens
  source 1..23: mol_type = other DNA
ttctggaaaaccagagagtttgg

SEQ ID NO: 1333 - DNA, 23 bp, Homo sapiens
  source 1..23: mol_type = other DNA
tttaggaaaaacagtgaatctag

SEQ ID NO: 1334 - DNA, 22 bp, Homo sapiens
  source 1..22: mol_type = other DNA
tgttacaaaaccagtggtcagg

SEQ ID NO: 1335 - DNA, 23 bp, Homo sapiens
  source 1..23: mol_type = other DNA
aggaggaaaacctgtgatttggg

SEQ ID NO: 1336 - DNA, 23 bp, Homo sapiens
  source 1..23: mol_type = other DNA
gggagggaaaccactgagtcagg

SEQ ID NO: 1337 - DNA, 22 bp, Homo sapiens
  source 1..22: mol_type = other DNA
gacaagaaaaccagtgaactgg

SEQ ID NO: 1338 - DNA, 23 bp, Homo sapiens
  source 1..23: mol_type = other DNA
tatgggaaagccagtgagttgag

SEQ ID NO: 1339 - DNA, 23 bp, Homo sapiens
  source 1..23: mol_type = other DNA
ccttggaaaaccagtgagtggaa

SEQ ID NO: 1340 - DNA, 23 bp, Homo sapiens
  source 1..23: mol_type = other DNA
actaaaataaccactgagtctgg

SEQ ID NO: 1341 - DNA, 22 bp, Homo sapiens
  source 1..22: mol_type = other DNA
acaaggaaaaccaggagtgtgg

SEQ ID NO: 1342 - DNA, 23 bp, Homo sapiens
  source 1..23: mol_type = other DNA
tataggtaaactagtgtcacggg

SEQ ID NO: 1343 - DNA, 23 bp, Homo sapiens
  source 1..23: mol_type = other DNA
ttttagtaaaccagtgagagagg

SEQ ID NO: 1344 - DNA, 22 bp, Homo sapiens
  source 1..22: mol_type = other DNA
tataggaaacaagtgagggctg

SEQ ID NO: 1345 - DNA, 22 bp, Homo sapiens
  source 1..22: mol_type = other DNA
aataggaaaacagggtgtctgg

SEQ ID NO: 1346 - DNA, 23 bp, Homo sapiens
  source 1..23: mol_type = other DNA
cataagaacaccagagagtaggg

SEQ ID NO: 1347 - DNA, 22 bp, Homo sapiens
  source 1..22: mol_type = other DNA
tttgagaaaaccagtggtcaga

SEQ ID NO: 1348 - DNA, 23 bp, Homo sapiens
  source 1..23: mol_type = other DNA
tgtgaggaaaccagtggttcagg

SEQ ID NO: 1349 - DNA, 23 bp, Homo sapiens
  source 1..23: mol_type = other DNA
cataagaaaaccactgagaaggg

SEQ ID NO: 1350 - DNA, 23 bp, Homo sapiens
  source 1..23: mol_type = other DNA
acaaggtaaaccagtgaggcggg

SEQ ID NO: 1351 - DNA, 22 bp, Homo sapiens
  source 1..22: mol_type = other DNA
cagaggaaaccagagggtctgg

SEQ ID NO: 1352 - DNA, 22 bp, Homo sapiens
  source 1..22: mol_type = other DNA
actaggacaaccagtagtcatg

SEQ ID NO: 1353 - DNA, 23 bp, Homo sapiens
  source 1..23: mol_type = other DNA
aataagaaaaccagtaattcagt

SEQ ID NO: 1354 - DNA, 21 bp, Homo sapiens
  source 1..21: mol_type = other DNA
cataggaaccagagagcctgg

SEQ ID NO: 1355 - DNA, 23 bp, Homo sapiens
  source 1..23: mol_type = other DNA
ggtaagtaaaccagtgaattagg

SEQ ID NO: 1356 - DNA, 23 bp, Homo sapiens
  source 1..23: mol_type = other DNA
tgtaagaaaaccagtaagctagt

SEQ ID NO: 1357 - DNA, 23 bp, Homo sapiens
  source 1..23: mol_type = other DNA
tgtaagaaaaccagcgagctagc

SEQ ID NO: 1358 - DNA, 23 bp, Homo sapiens
  source 1..23: mol_type = other DNA
tagaggaaaaccagtcagtggat

SEQ ID NO: 1359 - DNA, 22 bp, Homo sapiens
  source 1..22: mol_type = other DNA
aataggaaaactgttgatctgg

SEQ ID NO: 1360 - DNA, 22 bp, Homo sapiens
  source 1..22: mol_type = other DNA
aataggaaaactgtgaataagg

SEQ ID NO: 1361 - DNA, 22 bp, Homo sapiens
  source 1..22: mol_type = other DNA
tataaaataaccagtgaacagg

SEQ ID NO: 1362 - DNA, 22 bp, Homo sapiens
  source 1..22: mol_type = other DNA
tctggaagaccagtgagctggg

SEQ ID NO: 1363 - DNA, 23 bp, Homo sapiens
  source 1..23: mol_type = other DNA
tattagagagccagtgagtggga

SEQ ID NO: 1364 - DNA, 22 bp, Homo sapiens
  source 1..22: mol_type = other DNA
agtttgaaaaccagtggtctgg

SEQ ID NO: 1365 - DNA, 23 bp, Homo sapiens
  source 1..23: mol_type = other DNA
tacagggaaaccagtgagggggt

SEQ ID NO: 1366 - DNA, 22 bp, Homo sapiens
  source 1..22: mol_type = other DNA
tatttgaaaaccatgagtccag

SEQ ID NO: 1367 - DNA, 23 bp, Homo sapiens
  source 1..23: mol_type = other DNA
aatcggaaaaccaggtgatcggg

SEQ ID NO: 1368 - DNA, 24 bp, Homo sapiens
  source 1..24: mol_type = other DNA
ggtaggaaagaccagtgaggtagg

SEQ ID NO: 1369 - DNA, 22 bp, Homo sapiens
  source 1..22: mol_type = other DNA
taaggaaaaccagtaaatgcag

SEQ ID NO: 1370 - DNA, 22 bp, Homo sapiens
  source 1..22: mol_type = other DNA
tgtaggaaccccatgagtaagg

SEQ ID NO: 1371 - DNA, 23 bp, Homo sapiens
  source 1..23: mol_type = other DNA
tatatgaaaaacagtgagtacta

SEQ ID NO: 1372 - DNA, 23 bp, Homo sapiens
  source 1..23: mol_type = other DNA
agtaggaaaaccaagtagtccag

SEQ ID NO: 1373 - DNA, 23 bp, Homo sapiens
  source 1..23: mol_type = other DNA
cacaggaaaaccagtgagaagag

SEQ ID NO: 1374 - DNA, 23 bp, Homo sapiens
  source 1..23: mol_type = other DNA
tagattttaaccagtgagtccgt

SEQ ID NO: 1375 - DNA, 24 bp, Homo sapiens
  source 1..24: mol_type = other DNA
tatagcagaaacagtggagtctgg

SEQ ID NO: 1376 - DNA, 21 bp, Homo sapiens
  source 1..21: mol_type = other DNA
tataggtaaactagtgtcatg

SEQ ID NO: 1377 - DNA, 22 bp, Homo sapiens
  source 1..22: mol_type = other DNA
tataggattcccaggaatctgg

SEQ ID NO: 1378 - DNA, 23 bp, Homo sapiens
  source 1..23: mol_type = other DNA
gacattaaaaccagtgagtgagc

SEQ ID NO: 1379 - DNA, 22 bp, Homo sapiens
  source 1..22: mol_type = other DNA
gaaaggaaaacagtgagtgggc

SEQ ID NO: 1380 - DNA, 22 bp, Homo sapiens
  source 1..22: mol_type = other DNA
gaaagggaaaccagtgatcaga

SEQ ID NO: 1381 - DNA, 23 bp, Homo sapiens
  source 1..23: mol_type = other DNA
ttccagaaaaccagggagtctgg

SEQ ID NO: 1382 - DNA, 23 bp, Homo sapiens
  source 1..23: mol_type = other DNA
ggaaggaaaaacagtgagttcag

SEQ ID NO: 1383 - DNA, 22 bp, Homo sapiens
  source 1..22: mol_type = other DNA
caaaagaaaacagtgagtcaga

SEQ ID NO: 1384 - DNA, 23 bp, Homo sapiens
  source 1..23: mol_type = other DNA
tgggggaaagccagtgagccagg

SEQ ID NO: 1385 - DNA, 24 bp, Homo sapiens
  source 1..24: mol_type = other DNA
tatagggaagaccagtgattcaga

SEQ ID NO: 1386 - DNA, 21 bp, Homo sapiens
  source 1..21: mol_type = other DNA
gatatgaaaaccagagtctgg

SEQ ID NO: 1387 - DNA, 23 bp, Homo sapiens
  source 1..23: mol_type = other DNA
ttgaggaaaaccagtgagatgat

SEQ ID NO: 1388 - DNA, 23 bp, Homo sapiens
  source 1..23: mol_type = other DNA
tgtaagaaaaccatgtagtctag

SEQ ID NO: 1389 - DNA, 21 bp, Homo sapiens
  source 1..21: mol_type = other DNA
tgtagcaaccagtgattctgg

SEQ ID NO: 1390 - DNA, 21 bp, Homo sapiens
  source 1..21: mol_type = other DNA
gatagcaaaacctgagtctgg

SEQ ID NO: 1391 - DNA, 23 bp, Homo sapiens
  source 1..23: mol_type = other DNA
tattaggaaacctgtgggtcagg

SEQ ID NO: 1392 - DNA, 23 bp, Homo sapiens
  source 1..23: mol_type = other DNA
taaaggaaatccagtgacttctg

SEQ ID NO: 1393 - DNA, 23 bp, Homo sapiens
  source 1..23: mol_type = other DNA
gaaggaaaaaccagtgggtaggg

SEQ ID NO: 1394 - DNA, 23 bp, Homo sapiens
  source 1..23: mol_type = other DNA
attagtaaaaccagtgagttaaa

SEQ ID NO: 1395 - DNA, 22 bp, Homo sapiens
  source 1..22: mol_type = other DNA
tttaggaaaaccagaattatgg

SEQ ID NO: 1396 - DNA, 23 bp, Homo sapiens
  source 1..23: mol_type = other DNA
tgtaggaagtctagtgagtgagc

SEQ ID NO: 1397 - DNA, 23 bp, Homo sapiens
  source 1..23: mol_type = other DNA
ggtaggaaagacggtgagtgcgg

SEQ ID NO: 1398 - DNA, 23 bp, Homo sapiens
  source 1..23: mol_type = other DNA
tatataaaaatccatgagtcggg

SEQ ID NO: 1399 - DNA, 24 bp, Homo sapiens
  source 1..24: mol_type = other DNA
tatatgtaaaacaagtgagtgagg

SEQ ID NO: 1400 - DNA, 22 bp, Homo sapiens
  source 1..22: mol_type = other DNA
aataggaaaaccttgggtcagg

SEQ ID NO: 1401 - DNA, 23 bp, Homo sapiens
  source 1..23: mol_type = other DNA
tataggtaaacctgtgacatggg

SEQ ID NO: 1402 - DNA, 22 bp, Homo sapiens
  source 1..22: mol_type = other DNA
tatatgtaaacagtgattccgg

SEQ ID NO: 1403 - DNA, 23 bp, Homo sapiens
  source 1..23: mol_type = other DNA
tatatgaaaaccagtgatagaat

SEQ ID NO: 1404 - DNA, 22 bp, Homo sapiens
  source 1..22: mol_type = other DNA
tcaatcaaaaccagtgatctgg

SEQ ID NO: 1405 - DNA, 23 bp, Homo sapiens
  source 1..23: mol_type = other DNA
ttttggaaaaccagggagtgggg

SEQ ID NO: 1406 - DNA, 23 bp, Homo sapiens
  source 1..23: mol_type = other DNA
attaggaaactcagtgagacagg

SEQ ID NO: 1407 - DNA, 23 bp, Homo sapiens
  source 1..23: mol_type = other DNA
gaggggaagaccagtgagtccag

SEQ ID NO: 1408 - DNA, 23 bp, Homo sapiens
  source 1..23: mol_type = other DNA
aaaagaaaaaccagagagtggga

SEQ ID NO: 1409 - DNA, 23 bp, Homo sapiens
  source 1..23: mol_type = other DNA
ttgttgaaaaccagtgattgggg

SEQ ID NO: 1410 - DNA, 24 bp, Homo sapiens
  source 1..24: mol_type = other DNA
tgtaacaagaaccagtgagttggg

SEQ ID NO: 1411 - DNA, 23 bp, Homo sapiens
  source 1..23: mol_type = other DNA
aatatgaaaaccagtcagtcgtg

SEQ ID NO: 1412 - DNA, 23 bp, Homo sapiens
  source 1..23: mol_type = other DNA
aatgggaaaaccagagagttgag

SEQ ID NO: 1413 - DNA, 23 bp, Homo sapiens
  source 1..23: mol_type = other DNA
taaaaggaaaccagtgagtggat

SEQ ID NO: 1414 - DNA, 23 bp, Homo sapiens
  source 1..23: mol_type = other DNA
tatagcaaaagcagtaatcaggg

SEQ ID NO: 1415 - DNA, 22 bp, Homo sapiens
  source 1..22: mol_type = other DNA
tattgaaataccatgagtcagg

SEQ ID NO: 1416 - DNA, 23 bp, Homo sapiens
  source 1..23: mol_type = other DNA
ggtaggaaaatcagtaagtgagg

SEQ ID NO: 1417 - DNA, 23 bp, Homo sapiens
  source 1..23: mol_type = other DNA
gaaaagaaaagcagtgagtctgg

SEQ ID NO: 1418 - DNA, 23 bp, Homo sapiens
  source 1..23: mol_type = other DNA
cagaggtagaccactgagtcttg

SEQ ID NO: 1419 - DNA, 23 bp, Homo sapiens
  source 1..23: mol_type = other DNA
cacaggaaaaccaatgagaaagg

SEQ ID NO: 1420 - DNA, 22 bp, Homo sapiens
  source 1..22: mol_type = other DNA
tatgtgaaaaccattgatcagg

SEQ ID NO: 1421 - DNA, 23 bp, Homo sapiens
  source 1..23: mol_type = other DNA
catcctaaaaccagagattcagg

SEQ ID NO: 1422 - DNA, 23 bp, Homo sapiens
  source 1..23: mol_type = other DNA
tgtaggaaacccagtgaccagag

SEQ ID NO: 1423 - DNA, 23 bp, Homo sapiens
  source 1..23: mol_type = other DNA
ttagagtaaacaagtgagtcagg

SEQ ID NO: 1424 - DNA, 24 bp, Homo sapiens
  source 1..24: mol_type = other DNA
tataggcactgcagtgaggtctgg

SEQ ID NO: 1425 - DNA, 22 bp, Homo sapiens
  source 1..22: mol_type = other DNA
aatagaaagccagagattcagg

SEQ ID NO: 1426 - DNA, 22 bp, Homo sapiens
  source 1..22: mol_type = other DNA
tctagcaaaccagtgagtctgc

SEQ ID NO: 1427 - DNA, 23 bp, Homo sapiens
  source 1..23: mol_type = other DNA
tatacagaacccagagagtctgg

SEQ ID NO: 1428 - DNA, 23 bp, Homo sapiens
  source 1..23: mol_type = other DNA
ttcagggataccagtgagtcaaa

SEQ ID NO: 1429 - DNA, 23 bp, Homo sapiens
  source 1..23: mol_type = other DNA
gaagggaaaaccaatgagtacag

SEQ ID NO: 1430 - DNA, 23 bp, Homo sapiens
  source 1..23: mol_type = other DNA
caaagcaaaaccagtgagtctaa

SEQ ID NO: 1431 - DNA, 24 bp, Homo sapiens
  source 1..24: mol_type = other DNA
aggagggaaaccagatgagtcagg

SEQ ID NO: 1432 - DNA, 21 bp, Homo sapiens
  source 1..21: mol_type = other DNA
tgtctgaaaaccagagtctgg

SEQ ID NO: 1433 - DNA, 23 bp, Homo sapiens
  source 1..23: mol_type = other DNA
tgtttgaaaaccagtaagctagg

SEQ ID NO: 1434 - DNA, 23 bp, Homo sapiens
  source 1..23: mol_type = other DNA
aagaagaaaaccagtaagtggtg

SEQ ID NO: 1435 - DNA, 23 bp, Homo sapiens
  source 1..23: mol_type = other DNA
agtaagaaaaccatggagtgtgg

SEQ ID NO: 1436 - DNA, 23 bp, Homo sapiens
  source 1..23: mol_type = other DNA
agaaagaaaacctgtgagtaagg

SEQ ID NO: 1437 - DNA, 23 bp, Homo sapiens
  source 1..23: mol_type = other DNA
tataggtaaactcgtgactcagg

SEQ ID NO: 1438 - DNA, 22 bp, Homo sapiens
  source 1..22: mol_type = other DNA
tataagaagaacatgagtcagg

SEQ ID NO: 1439 - DNA, 22 bp, Homo sapiens
  source 1..22: mol_type = other DNA
gataggtacaccatgagcctgg

SEQ ID NO: 1440 - DNA, 22 bp, Homo sapiens
  source 1..22: mol_type = other DNA
tagaggagaaccaggagtgtgt

SEQ ID NO: 1441 - DNA, 23 bp, Homo sapiens
  source 1..23: mol_type = other DNA
aaatcaaaaatcagtgagtctgg

SEQ ID NO: 1442 - DNA, 23 bp, Homo sapiens
  source 1..23: mol_type = other DNA
tattggaaaggctgtgtgtatgg

SEQ ID NO: 1443 - DNA, 23 bp, Homo sapiens
  source 1..23: mol_type = other DNA
ttgtggaaaaccactgaatttgg

SEQ ID NO: 1444 - DNA, 23 bp, Homo sapiens
  source 1..23: mol_type = other DNA
tatattttaaccagtgagctagg

SEQ ID NO: 1445 - DNA, 23 bp, Homo sapiens
  source 1..23: mol_type = other DNA
taaaggtgaacctgtgattctgg

SEQ ID NO: 1446 - DNA, 23 bp, Homo sapiens
  source 1..23: mol_type = other DNA
gatagggacaccagtgagttgct

SEQ ID NO: 1447 - DNA, 24 bp, Homo sapiens
  source 1..24: mol_type = other DNA
aataggatacactagagagtctgg

SEQ ID NO: 1448 - DNA, 21 bp, Homo sapiens
  source 1..21: mol_type = other DNA
gaatggaaaacctgagtctgg

SEQ ID NO: 1449 - DNA, 23 bp, Homo sapiens
  source 1..23: mol_type = other DNA
agtaggagaaagagtgagttggg

SEQ ID NO: 1450 - DNA, 23 bp, Homo sapiens
  source 1..23: mol_type = other DNA
aaaaggaaaacgagtgagaagga

SEQ ID NO: 1451 - DNA, 23 bp, Homo sapiens
  source 1..23: mol_type = other DNA
ttctgggaaaccagtgagtcaca

SEQ ID NO: 1452 - DNA, 23 bp, Homo sapiens
  source 1..23: mol_type = other DNA
tctaagaaaaccaatcagtgtgc

SEQ ID NO: 1453 - DNA, 23 bp, Homo sapiens
  source 1..23: mol_type = other DNA
tataaggacaccagtgatatggg

SEQ ID NO: 1454 - DNA, 23 bp, Homo sapiens
  source 1..23: mol_type = other DNA
tataggaaaacaaatgactttgg

SEQ ID NO: 1455 - DNA, 23 bp, Homo sapiens
  source 1..23: mol_type = other DNA
ttaggggaagccagtgagccagg

SEQ ID NO: 1456 - DNA, 23 bp, Homo sapiens
  source 1..23: mol_type = other DNA
aataagagaaccagtgagtgttt

SEQ ID NO: 1457 - DNA, 23 bp, Homo sapiens
  source 1..23: mol_type = other DNA
tatagtaaaaccaatgagaaagt

SEQ ID NO: 1458 - DNA, 22 bp, Homo sapiens
  source 1..22: mol_type = other DNA
tatagaagaggaatgagtctgg

SEQ ID NO: 1459 - DNA, 22 bp, Homo sapiens
  source 1..22: mol_type = other DNA
catggaataccaatgagtgagg

SEQ ID NO: 1460 - DNA, 22 bp, Homo sapiens
  source 1..22: mol_type = other DNA
tataggaaatcaatgaggcaga

SEQ ID NO: 1461 - DNA, 22 bp, Homo sapiens
  source 1..22: mol_type = other DNA
tttaggaaaagagtgagtgagg

SEQ ID NO: 1462 - DNA, 23 bp, Homo sapiens
  source 1..23: mol_type = other DNA
aaaacgaaaaccagtgaggcgtg

SEQ ID NO: 1463 - DNA, 23 bp, Homo sapiens
  source 1..23: mol_type = other DNA
cagatggaaagcagtgattcggg

SEQ ID NO: 1464 - DNA, 23 bp, Homo sapiens
  source 1..23: mol_type = other DNA
aataggaagatcagagagcctag

SEQ ID NO: 1465 - DNA, 23 bp, Homo sapiens
  source 1..23: mol_type = other DNA
gtgagaaaaaacaatgagtctgg

SEQ ID NO: 1466 - DNA, 23 bp, Homo sapiens
  source 1..23: mol_type = other DNA
aataggaaaacccctgagttaca

SEQ ID NO: 1467 - DNA, 23 bp, Homo sapiens
  source 1..23: mol_type = other DNA
aagatctataccagtgagtctgg

SEQ ID NO: 1468 - DNA, 23 bp, Homo sapiens
  source 1..23: mol_type = other DNA
cctaggaaaacctgaggctctgg

SEQ ID NO: 1469 - DNA, 23 bp, Homo sapiens
  source 1..23: mol_type = other DNA
gataggattaccattgaatctgt

SEQ ID NO: 1470 - DNA, 23 bp, Homo sapiens
  source 1..23: mol_type = other DNA
tataggtaaataagtgagtttca

SEQ ID NO: 1471 - DNA, 23 bp, Homo sapiens
  source 1..23: mol_type = other DNA
tatagaataaccagtgagaaaag

SEQ ID NO: 1472 - DNA, 22 bp, Homo sapiens
  source 1..22: mol_type = other DNA
tatacggaaacagtaagtatgg

SEQ ID NO: 1473 - DNA, 22 bp, Homo sapiens
  source 1..22: mol_type = other DNA
catgggaaaaccatgtgtctga

SEQ ID NO: 1474 - DNA, 21 bp, Homo sapiens
  source 1..21: mol_type = other DNA
taaagaaaaacctgagactgg

SEQ ID NO: 1475 - DNA, 22 bp, Homo sapiens
  source 1..22: mol_type = other DNA
tataggaaaacagtgatgaaga

SEQ ID NO: 1476 - DNA, 22 bp, Homo sapiens
  source 1..22: mol_type = other DNA
cataggaaaactagtagtatgc

SEQ ID NO: 1477 - DNA, 23 bp, Homo sapiens
  source 1..23: mol_type = other DNA
tagaagaaaagtagtgaggcatg

SEQ ID NO: 1478 - DNA, 23 bp, Homo sapiens
  source 1..23: mol_type = other DNA
tgtaggtaaactagtgtcacggg

SEQ ID NO: 1479 - DNA, 23 bp, Homo sapiens
  source 1..23: mol_type = other DNA
attaggaaaaccagtttatcaga

SEQ ID NO: 1480 - DNA, 23 bp, Homo sapiens
  source 1..23: mol_type = other DNA
tgtagaaaagccactgaattggg

SEQ ID NO: 1481 - DNA, 23 bp, Homo sapiens
  source 1..23: mol_type = other DNA
tagaggaaaaccagaaacactgg

SEQ ID NO: 1482 - DNA, 23 bp, Homo sapiens
  source 1..23: mol_type = other DNA
tgtttgtaaaccagtgagacaag

SEQ ID NO: 1483 - DNA, 23 bp, Homo sapiens
  source 1..23: mol_type = other DNA
tctaggataacaagtgagttaca

SEQ ID NO: 1484 - DNA, 23 bp, Homo sapiens
  source 1..23: mol_type = other DNA
tataagaaaacaagtaattctga

SEQ ID NO: 1485 - DNA, 23 bp, Homo sapiens
  source 1..23: mol_type = other DNA
cagaggacaaccagttagtggga

SEQ ID NO: 1486 - DNA, 23 bp, Homo sapiens
  source 1..23: mol_type = other DNA
taaaggaaaaccaatgactgatg

SEQ ID NO: 1487 - DNA, 23 bp, Homo sapiens
  source 1..23: mol_type = other DNA
gaatggaaaagcactgagtcaga

SEQ ID NO: 1488 - DNA, 23 bp, Homo sapiens
  source 1..23: mol_type = other DNA
aatagaaaaaccagggaattggg

SEQ ID NO: 1489 - DNA, 23 bp, Homo sapiens
  source 1..23: mol_type = other DNA
tataggaaaccccataagacaag

SEQ ID NO: 1490 - DNA, 23 bp, Homo sapiens
  source 1..23: mol_type = other DNA
aataggaaaaccagtgcggtaat

SEQ ID NO: 1491 - DNA, 23 bp, Homo sapiens
  source 1..23: mol_type = other DNA
taaagagacaccagtgattccgt

SEQ ID NO: 1492 - DNA, 23 bp, Homo sapiens
  source 1..23: mol_type = other DNA
tagaggaaaagcaatgaaattgg

SEQ ID NO: 1493 - DNA, 23 bp, Homo sapiens
  source 1..23: mol_type = other DNA
tataggaaaaccagagaaaaata

SEQ ID NO: 1494 - DNA, 23 bp, Homo sapiens
  source 1..23: mol_type = other DNA
aggatgaaacccagtaagtctgg

SEQ ID NO: 1495 - DNA, 23 bp, Homo sapiens
  source 1..23: mol_type = other DNA
tatagagaaacaagtgattaaga

SEQ ID NO: 1496 - DNA, 23 bp, Homo sapiens
  source 1..23: mol_type = other DNA
tatagaaacaccagtgattttat

SEQ ID NO: 1497 - DNA, 23 bp, Homo sapiens
  source 1..23: mol_type = other DNA
gataggaatagcattgaatctgt

SEQ ID NO: 1498 - DNA, 24 bp, Homo sapiens
  source 1..24: mol_type = other DNA
tatagaaaatactagtgggtaagg

SEQ ID NO: 1499 - DNA, 22 bp, Homo sapiens
  source 1..22: mol_type = other DNA
tagaggaaaacctgtagtaaga

SEQ ID NO: 1500 - DNA, 22 bp, Homo sapiens
  source 1..22: mol_type = other DNA
tatagatagccagtaagtcaag

SEQ ID NO: 1501 - DNA, 22 bp, Homo sapiens
  source 1..22: mol_type = other DNA
tataggtaaaccatgactacag

SEQ ID NO: 1502 - DNA, 22 bp, Homo sapiens
  source 1..22: mol_type = other DNA
tacaggaaaagtaggattcggg

SEQ ID NO: 1503 - DNA, 21 bp, Homo sapiens
  source 1..21: mol_type = other DNA
tataggaaaataaaagtctgg

SEQ ID NO: 1504 - DNA, 23 bp, Homo sapiens
  source 1..23: mol_type = other DNA
tataggaagtccatggagtagag

SEQ ID NO: 1505 - DNA, 23 bp, Homo sapiens
  source 1..23: mol_type = other DNA
tgggggaaaaccagttaggaagg

SEQ ID NO: 1506 - DNA, 23 bp, Homo sapiens
  source 1..23: mol_type = other DNA
taaaggaaattctgtgaaactgg

SEQ ID NO: 1507 - DNA, 23 bp, Homo sapiens
  source 1..23: mol_type = other DNA
cagagaaaaaccagtgagtttca

SEQ ID NO: 1508 - DNA, 23 bp, Homo sapiens
  source 1..23: mol_type = other DNA
tatagtaaaacaagtgaaataga

SEQ ID NO: 1509 - DNA, 23 bp, Homo sapiens
  source 1..23: mol_type = other DNA
taaaagaaaaccagttattccag

SEQ ID NO: 1510 - DNA, 23 bp, Homo sapiens
  source 1..23: mol_type = other DNA
tcgaggaaaatcagtgtctctgg

SEQ ID NO: 1511 - DNA, 23 bp, Homo sapiens
  source 1..23: mol_type = other DNA
aatacaaaaaccagtcaggcgcg

SEQ ID NO: 1512 - DNA, 23 bp, Homo sapiens
  source 1..23: mol_type = other DNA
tttaggaatacctaagagtcctg

SEQ ID NO: 1513 - DNA, 23 bp, Homo sapiens
  source 1..23: mol_type = other DNA
tacatgaaattcactgaatctgg

SEQ ID NO: 1514 - DNA, 23 bp, Homo sapiens
  source 1..23: mol_type = other DNA
tataagaaaaccagtcatattgg

SEQ ID NO: 1515 - DNA, 23 bp, Homo sapiens
  source 1..23: mol_type = other DNA
agtgggaaaacctgttagtttgg

SEQ ID NO: 1516 - DNA, 25 bp, Homo sapiens
  source 1..25: mol_type = other DNA
catagtaaaaccaatgacagtttgg

SEQ ID NO: 1517 - DNA, 24 bp, Homo sapiens
  source 1..24: mol_type = other DNA
aatagaaagactcagtgagtctag

SEQ ID NO: 1518 - DNA, 22 bp, Homo sapiens
  source 1..22: mol_type = other DNA
taaagaaaaccagcaagtaagg

SEQ ID NO: 1519 - DNA, 22 bp, Homo sapiens
  source 1..22: mol_type = other DNA
catgggaaaagctggagtcagg

SEQ ID NO: 1520 - DNA, 22 bp, Homo sapiens
  source 1..22: mol_type = other DNA
tgaaagaaaaccaggagtcaga

SEQ ID NO: 1521 - DNA, 22 bp, Homo sapiens
  source 1..22: mol_type = other DNA
tataaaaaatctagtggtcagg

SEQ ID NO: 1522 - DNA, 21 bp, Homo sapiens
  source 1..21: mol_type = other DNA
tataggaacacctgtgtctga

SEQ ID NO: 1523 - DNA, 22 bp, Homo sapiens
  source 1..22: mol_type = other DNA
cataagaaaaccatgagtcatg

SEQ ID NO: 1524 - DNA, 22 bp, Homo sapiens
  source 1..22: mol_type = other DNA
taaaggaaaaacaatgatgtgg

SEQ ID NO: 1525 - DNA, 23 bp, Homo sapiens
  source 1..23: mol_type = other DNA
tgtagaaaaaccagtgaataaga

SEQ ID NO: 1526 - DNA, 23 bp, Homo sapiens
  source 1..23: mol_type = other DNA
caaaggaaaaccagtgagtgtgg

SEQ ID NO: 1527 - DNA, 23 bp, Homo sapiens
  source 1..23: mol_type = other DNA
agcaggaaaaccagtgagcagag

SEQ ID NO: 1528 - DNA, 24 bp, Homo sapiens
  source 1..24: mol_type = other DNA
tcaagtagaaaccaatgagtcagg

SEQ ID NO: 1529 - DNA, 23 bp, Homo sapiens
  source 1..23: mol_type = other DNA
tgtaagaataccagtgaggctgg

SEQ ID NO: 1530 - DNA, 23 bp, Homo sapiens
  source 1..23: mol_type = other DNA
tgtagagagaccagtgagtaggg

SEQ ID NO: 1531 - DNA, 23 bp, Homo sapiens
  source 1..23: mol_type = other DNA
aatagcaaaaccaataagtagga

SEQ ID NO: 1532 - DNA, 22 bp, Homo sapiens
  source 1..22: mol_type = other DNA
tgtagataaaccagtgatatgg

SEQ ID NO: 1533 - DNA, 23 bp, Homo sapiens
  source 1..23: mol_type = other DNA
tgtagctaaatcagtgagtagga

SEQ ID NO: 1534 - DNA, 24 bp, Homo sapiens
  source 1..24: mol_type = other DNA
tatagaaaaaatcagtgagtcagg

SEQ ID NO: 1535 - DNA, 22 bp, Homo sapiens
  source 1..22: mol_type = other DNA
tatagaaaaccagaaagcctgg

SEQ ID NO: 1536 - DNA, 22 bp, Homo sapiens
  source 1..22: mol_type = other DNA
cctaggaaaactagtgaacggg

SEQ ID NO: 1537 - DNA, 23 bp, Homo sapiens
  source 1..23: mol_type = other DNA
ttgaggaaaactagtgagtgagc

SEQ ID NO: 1538 - DNA, 23 bp, Homo sapiens
  source 1..23: mol_type = other DNA
gtggggaaaaccagtgagccagg

SEQ ID NO: 1539 - DNA, 22 bp, Homo sapiens
  source 1..22: mol_type = other DNA
tataggtcaccattgagtcaag

SEQ ID NO: 1540 - DNA, 23 bp, Homo sapiens
  source 1..23: mol_type = other DNA
ggtaggaaaaccagttatccagg

SEQ ID NO: 1541 - DNA, 21 bp, Homo sapiens
  source 1..21: mol_type = other DNA
tataggaaaccaaaagtcagg

SEQ ID NO: 1542 - DNA, 23 bp, Homo sapiens
  source 1..23: mol_type = other DNA
tatgaggaaaccagtgagtagaa

SEQ ID NO: 1543 - DNA, 22 bp, Homo sapiens
  source 1..22: mol_type = other DNA
tataggaaaactataaatcagg

SEQ ID NO: 1544 - DNA, 22 bp, Homo sapiens
  source 1..22: mol_type = other DNA
catatgaaaccagtgagtaaga

SEQ ID NO: 1545 - DNA, 23 bp, Homo sapiens
  source 1..23: mol_type = other DNA
tataggaaaaacagtgtatacag

SEQ ID NO: 1546 - DNA, 23 bp, Homo sapiens
  source 1..23: mol_type = other DNA
tagaggaaaaccagagagaaggt

SEQ ID NO: 1547 - DNA, 23 bp, Homo sapiens
  source 1..23: mol_type = other DNA
gacataaaaaccagtgagtgtgg

SEQ ID NO: 1548 - DNA, 23 bp, Homo sapiens
  source 1..23: mol_type = other DNA
attgggaaaaccagtgactctga

SEQ ID NO: 1549 - DNA, 23 bp, Homo sapiens
  source 1..23: mol_type = other DNA
tataaagagaccagtgagtgtgg

SEQ ID NO: 1550 - DNA, 23 bp, Homo sapiens
  source 1..23: mol_type = other DNA
tataggtaaactaatgactcggg

SEQ ID NO: 1551 - DNA, 22 bp, Homo sapiens
  source 1..22: mol_type = other DNA
cataggaaaaccaataggctgg

SEQ ID NO: 1552 - DNA, 23 bp, Homo sapiens
  source 1..23: mol_type = other DNA
gataggaaaaacagagagctgga

SEQ ID NO: 1553 - DNA, 22 bp, Homo sapiens
  source 1..22: mol_type = other DNA
tatagaaaaactagtggccagg

SEQ ID NO: 1554 - DNA, 23 bp, Homo sapiens
  source 1..23: mol_type = other DNA
cctaggaaagccagtgaggtgga

SEQ ID NO: 1555 - DNA, 23 bp, Homo sapiens
  source 1..23: mol_type = other DNA
taaagaaaaaccaatgaatctgg

SEQ ID NO: 1556 - DNA, 22 bp, Homo sapiens
  source 1..22: mol_type = other DNA
tataggataaccaagagtcctg

SEQ ID NO: 1557 - DNA, 22 bp, Homo sapiens
  source 1..22: mol_type = other DNA
cataagaaaaccaagactcagg

SEQ ID NO: 1558 - DNA, 23 bp, Homo sapiens
  source 1..23: mol_type = other DNA
aatatgtaaaccagtgggtctgg

SEQ ID NO: 1559 - DNA, 22 bp, Homo sapiens
  source 1..22: mol_type = other DNA
tgtatgaacccagtgggtctgg

SEQ ID NO: 1560 - DNA, 22 bp, Homo sapiens
  source 1..22: mol_type = other DNA
ttaagtaaaaccataagtcagg

SEQ ID NO: 1561 - DNA, 23 bp, Homo sapiens
  source 1..23: mol_type = other DNA
tataggaaaaccagtgaccagtg

SEQ ID NO: 1562 - DNA, 22 bp, Homo sapiens
  source 1..22: mol_type = other DNA
ttactgaaaaccagtagtcggg

SEQ ID NO: 1563 - DNA, 25 bp, Homo sapiens
  source 1..25: mol_type = other DNA
tgtagtaaggaaccagtaagtaggg

SEQ ID NO: 1564 - DNA, 23 bp, Homo sapiens
  source 1..23: mol_type = other DNA
tgtagctaaaacagtgagttgga

SEQ ID NO: 1565 - DNA, 22 bp, Homo sapiens
  source 1..22: mol_type = other DNA
ttactgaaaaccagtagtcagg

SEQ ID NO: 1566 - DNA, 21 bp, Homo sapiens
  source 1..21: mol_type = other DNA
taaaggaaaacctgagtctgg

SEQ ID NO: 1567 - DNA, 24 bp, Homo sapiens
  source 1..24: mol_type = other DNA
tatattaaaaaccagtgagtcata

SEQ ID NO: 1568 - DNA, 23 bp, Homo sapiens
  source 1..23: mol_type = other DNA
tggaggaaagccagtgagtcaag

SEQ ID NO: 1569 - DNA, 23 bp, Homo sapiens
  source 1..23: mol_type = other DNA
tagttaaaaaccagtgagtaaga

SEQ ID NO: 1570 - DNA, 23 bp, Homo sapiens
  source 1..23: mol_type = other DNA
ttaaggaacaccagtgagtctgg

SEQ ID NO: 1571 - DNA, 23 bp, Homo sapiens
  source 1..23: mol_type = other DNA
tacaggaaaaccagagaagtggg

SEQ ID NO: 1572 - DNA, 23 bp, Homo sapiens
  source 1..23: mol_type = other DNA
caaaggaaaaccagtgacaggtg

SEQ ID NO: 1573 - DNA, 22 bp, Homo sapiens
  source 1..22: mol_type = other DNA
tataagaaaccaatgtctctgg

SEQ ID NO: 1574 - DNA, 23 bp, Homo sapiens
  source 1..23: mol_type = other DNA
aataggaaaaccagagagcggac

SEQ ID NO: 1575 - DNA, 21 bp, Homo sapiens
  source 1..21: mol_type = other DNA
aataggaaaaccaggtactgg

SEQ ID NO: 1576 - DNA, 23 bp, Homo sapiens
  source 1..23: mol_type = other DNA
tataggtaaaccagtgtcatgag

SEQ ID NO: 1577 - DNA, 23 bp, Homo sapiens
  source 1..23: mol_type = other DNA
tgtaggaaaatcaatgaacaggg

SEQ ID NO: 1578 - DNA, 23 bp, Homo sapiens
  source 1..23: mol_type = other DNA
aagatcaaaaccagtgagtgagg

SEQ ID NO: 1579 - DNA, 22 bp, Homo sapiens
  source 1..22: mol_type = other DNA
ggtaggggaccagtgagtcagg

SEQ ID NO: 1580 - DNA, 23 bp, Homo sapiens
  source 1..23: mol_type = other DNA
ttgtggaaaaccactgagtttgg

SEQ ID NO: 1581 - DNA, 22 bp, Homo sapiens
  source 1..22: mol_type = other DNA
tacaggaaaacagtaattctgg

SEQ ID NO: 1582 - DNA, 23 bp, Homo sapiens
  source 1..23: mol_type = other DNA
tgaggtaaaaccagtgaggtagg

SEQ ID NO: 1583 - DNA, 23 bp, Homo sapiens
  source 1..23: mol_type = other DNA
aacaggaaaaccagtgtaatagg

SEQ ID NO: 1584 - DNA, 23 bp, Homo sapiens
  source 1..23: mol_type = other DNA
aaaaggcaaaccaatgagtggga

SEQ ID NO: 1585 - DNA, 21 bp, Homo sapiens
  source 1..21: mol_type = other DNA
cataggaaaaccagtatcaga

SEQ ID NO: 1586 - DNA, 23 bp, Homo sapiens
  source 1..23: mol_type = other DNA
tattataagaaaagtgagtctgg

SEQ ID NO: 1587 - DNA, 21 bp, Homo sapiens
  source 1..21: mol_type = other DNA
caaaggaaccagtgagttggg

SEQ ID NO: 1588 - DNA, 23 bp, Homo sapiens
  source 1..23: mol_type = other DNA
cttttgtaaaccagtgagtctgc

SEQ ID NO: 1589 - DNA, 23 bp, Homo sapiens
  source 1..23: mol_type = other DNA
aataagaaaaacagtgagtccag

SEQ ID NO: 1590 - DNA, 22 bp, Homo sapiens
  source 1..22: mol_type = other DNA
ggtatgaaatcagtgagtctgg

SEQ ID NO: 1591 - DNA, 23 bp, Homo sapiens
  source 1..23: mol_type = other DNA
agaagaaaaaccagagagtgagg

SEQ ID NO: 1592 - DNA, 23 bp, Homo sapiens
  source 1..23: mol_type = other DNA
tagaggacaatcagtgagtcaag

SEQ ID NO: 1593 - DNA, 22 bp, Homo sapiens
  source 1..22: mol_type = other DNA
ggtagggcaccagtgagtcagg

SEQ ID NO: 1594 - DNA, 22 bp, Homo sapiens
  source 1..22: mol_type = other DNA
tataggagaacagagagtttgg

SEQ ID NO: 1595 - DNA, 23 bp, Homo sapiens
  source 1..23: mol_type = other DNA
gataggaaagccagtggtttagg

SEQ ID NO: 1596 - DNA, 23 bp, Homo sapiens
  source 1..23: mol_type = other DNA
taaggaagaaccagtgaggtcgg

SEQ ID NO: 1597 - DNA, 22 bp, Homo sapiens
  source 1..22: mol_type = other DNA
aatatgaagccagtaagtcagg

SEQ ID NO: 1598 - DNA, 22 bp, Homo sapiens
  source 1..22: mol_type = other DNA
tataagaaaaccaggtgtcaga

SEQ ID NO: 1599 - DNA, 21 bp, Homo sapiens
  source 1..21: mol_type = other DNA
tataggaaaaagtgagatggg

SEQ ID NO: 1600 - DNA, 22 bp, Homo sapiens
  source 1..22: mol_type = other DNA
aataggaaaaaagtgaatgagg

SEQ ID NO: 1601 - DNA, 21 bp, Homo sapiens
  source 1..21: mol_type = other DNA
gataggaaaacctgaaactgg

SEQ ID NO: 1602 - DNA, 23 bp, Homo sapiens
  source 1..23: mol_type = other DNA
cagggggaaaccagtgagctggg

SEQ ID NO: 1603 - DNA, 22 bp, Homo sapiens
  source 1..22: mol_type = other DNA
tgcatcaaaaccagtgatcagg

SEQ ID NO: 1604 - DNA, 22 bp, Homo sapiens
  source 1..22: mol_type = other DNA
tctaggcaaccagtgagtatgg

SEQ ID NO: 1605 - DNA, 23 bp, Homo sapiens
  source 1..23: mol_type = other DNA
ttcttgaaaaccagtgagtggag

SEQ ID NO: 1606 - DNA, 23 bp, Homo sapiens
  source 1..23: mol_type = other DNA
tgagagaaagccagtgagttggg

SEQ ID NO: 1607 - DNA, 22 bp, Homo sapiens
  source 1..22: mol_type = other DNA
gataagcaaaccagtgaacggg

SEQ ID NO: 1608 - DNA, 22 bp, Homo sapiens
  source 1..22: mol_type = other DNA
tataggataccattgagtatag

SEQ ID NO: 1609 - DNA, 23 bp, Homo sapiens
  source 1..23: mol_type = other DNA
gatcagagcacctgtgagtcagg

SEQ ID NO: 1610 - DNA, 23 bp, Homo sapiens
  source 1..23: mol_type = other DNA
tatgaggaaaccagtgagggagc

SEQ ID NO: 1611 - DNA, 21 bp, Homo sapiens
  source 1..21: mol_type = other DNA
tgtaagaaaaccagtgtcaga

SEQ ID NO: 1612 - DNA, 23 bp, Homo sapiens
  source 1..23: mol_type = other DNA
taaaggaaaacctgagactgggt

SEQ ID NO: 1613 - DNA, 23 bp, Homo sapiens
  source 1..23: mol_type = other DNA
tctaaataaaccagtgattccag

SEQ ID NO: 1614 - DNA, 22 bp, Homo sapiens
  source 1..22: mol_type = other DNA
gctaggaaaaccagttgtaggg

SEQ ID NO: 1615 - DNA, 23 bp, Homo sapiens
  source 1..23: mol_type = other DNA
aatacgaaaaccagtgaggcgtg

SEQ ID NO: 1616 - DNA, 23 bp, Homo sapiens
  source 1..23: mol_type = other DNA
tttgggagaaccagtgagaagga

SEQ ID NO: 1617 - DNA, 23 bp, Homo sapiens
  source 1..23: mol_type = other DNA
tgggggaaagccagtgagctggg

SEQ ID NO: 1618 - DNA, 23 bp, Homo sapiens
  source 1..23: mol_type = other DNA
tatgagagaaccagtgaattggt

SEQ ID NO: 1619 - DNA, 22 bp, Homo sapiens
  source 1..22: mol_type = other DNA
ttgaggaaacacagtgagcggg

SEQ ID NO: 1620 - DNA, 23 bp, Homo sapiens
  source 1..23: mol_type = other DNA
ggtaaggagaccaatgagtcagg

SEQ ID NO: 1621 - DNA, 22 bp, Homo sapiens
  source 1..22: mol_type = other DNA
gataagaaaaccaagattcagg

SEQ ID NO: 1622 - DNA, 23 bp, Homo sapiens
  source 1..23: mol_type = other DNA
gaagggaaaaccagtgaatacag

SEQ ID NO: 1623 - DNA, 23 bp, Homo sapiens
  source 1..23: mol_type = other DNA
aatatggaaaccaatgagcatgg

SEQ ID NO: 1624 - DNA, 21 bp, Homo sapiens
  source 1..21: mol_type = other DNA
gaaaggaaacagtgattcagg

SEQ ID NO: 1625 - DNA, 23 bp, Homo sapiens
  source 1..23: mol_type = other DNA
tgcaaacaaaccaatgagtcagg

SEQ ID NO: 1626 - DNA, 22 bp, Homo sapiens
  source 1..22: mol_type = other DNA
tttaggctaccagtgagcctgg

SEQ ID NO: 1627 - DNA, 22 bp, Homo sapiens
  source 1..22: mol_type = other DNA
catggtaagaccagtagtcagg

SEQ ID NO: 1628 - DNA, 22 bp, Homo sapiens
  source 1..22: mol_type = other DNA
gacaggacaaacagtgagctgg

SEQ ID NO: 1629 - DNA, 23 bp, Homo sapiens
  source 1..23: mol_type = other DNA
tatgggaaaacaagtggttctgc

SEQ ID NO: 1630 - DNA, 23 bp, Homo sapiens
  source 1..23: mol_type = other DNA
aagctgaaaaccagtgaggttgg

SEQ ID NO: 1631 - DNA, 23 bp, Homo sapiens
  source 1..23: mol_type = other DNA
tagaggagaaccaggaattctgt

SEQ ID NO: 1632 - DNA, 24 bp, Homo sapiens
  source 1..24: mol_type = other DNA
gcaaggaaaaccacgtgagactgg

SEQ ID NO: 1633 - DNA, 23 bp, Homo sapiens
  source 1..23: mol_type = other DNA
aatagggaggccagtgagtatgg

SEQ ID NO: 1634 - DNA, 23 bp, Homo sapiens
  source 1..23: mol_type = other DNA
cagagggaagccagtgaggctgt

SEQ ID NO: 1635 - DNA, 23 bp, Homo sapiens
  source 1..23: mol_type = other DNA
tataggaatgcaagtgatttttg

SEQ ID NO: 1636 - DNA, 23 bp, Homo sapiens
  source 1..23: mol_type = other DNA
cataggaaaacacctgagcctgg

SEQ ID NO: 1637 - DNA, 23 bp, Homo sapiens
  source 1..23: mol_type = other DNA
tataggaatactagcgatttttg

SEQ ID NO: 1638 - DNA, 23 bp, Homo sapiens
  source 1..23: mol_type = other DNA
aagagcagtaccagtgagttagg

SEQ ID NO: 1639 - DNA, 23 bp, Homo sapiens
  source 1..23: mol_type = other DNA
tgaggggtaacctgtgagtctgg

SEQ ID NO: 1640 - DNA, 24 bp, Homo sapiens
  source 1..24: mol_type = other DNA
aagaggaaaaccaggagagtgggg

SEQ ID NO: 1641 - DNA, 22 bp, Homo sapiens
  source 1..22: mol_type = other DNA
tatgtaaatccagtgagttaga

SEQ ID NO: 1642 - DNA, 22 bp, Homo sapiens
  source 1..22: mol_type = other DNA
gatgggaaaactactgatcagg

SEQ ID NO: 1643 - DNA, 22 bp, Homo sapiens
  source 1..22: mol_type = other DNA
tatatgaaaccagtaagtctaa

SEQ ID NO: 1644 - DNA, 23 bp, Homo sapiens
  source 1..23: mol_type = other DNA
aaaaagaaaagcagtgagtgggc

SEQ ID NO: 1645 - DNA, 23 bp, Homo sapiens
  source 1..23: mol_type = other DNA
tgtagggaaaccagaacttcagg

SEQ ID NO: 1646 - DNA, 23 bp, Homo sapiens
  source 1..23: mol_type = other DNA
catggaacaaccagtaagtcaag

SEQ ID NO: 1647 - DNA, 23 bp, Homo sapiens
  source 1..23: mol_type = other DNA
tgtaggtgattcagtgagttagg

SEQ ID NO: 1648 - DNA, 23 bp, Homo sapiens
  source 1..23: mol_type = other DNA
gagaggaagaccacagagtaagg

SEQ ID NO: 1649 - DNA, 22 bp, Homo sapiens
  source 1..22: mol_type = other DNA
aactggaaatccaggagtctgg

SEQ ID NO: 1650 - DNA, 23 bp, Homo sapiens
  source 1..23: mol_type = other DNA
tatgtaaaaactagtgagtgagg

SEQ ID NO: 1651 - DNA, 23 bp, Homo sapiens
  source 1..23: mol_type = other DNA
aataggaaatggagagagactgg

SEQ ID NO: 1652 - DNA, 23 bp, Homo sapiens
  source 1..23: mol_type = other DNA
cagcaaaaaaccagtgagactgg

SEQ ID NO: 1653 - DNA, 23 bp, Homo sapiens
  source 1..23: mol_type = other DNA
agcaggaaaaccactgggtcctg

SEQ ID NO: 1654 - DNA, 23 bp, Homo sapiens
  source 1..23: mol_type = other DNA
tatatgaaaagcagtgagtcagc

SEQ ID NO: 1655 - DNA, 23 bp, Homo sapiens
  source 1..23: mol_type = other DNA
tataagggaactagtgagccaag

SEQ ID NO: 1656 - DNA, 23 bp, Homo sapiens
  source 1..23: mol_type = other DNA
tataggaaaaacagtgctcttgg

SEQ ID NO: 1657 - DNA, 24 bp, Homo sapiens
  source 1..24: mol_type = other DNA
tataggcaatgccagtgagtgcga

SEQ ID NO: 1658 - DNA, 21 bp, Homo sapiens
  source 1..21: mol_type = other DNA
tatagaaaccaatgagtattg

SEQ ID NO: 1659 - DNA, 21 bp, Homo sapiens
  source 1..21: mol_type = other DNA
tgtaggaaaaccagtctctag

SEQ ID NO: 1660 - DNA, 23 bp, Homo sapiens
  source 1..23: mol_type = other DNA
tagggcaaacacagtgagtatgg

SEQ ID NO: 1661 - DNA, 23 bp, Homo sapiens
  source 1..23: mol_type = other DNA
tattggcaaggcagtgtgccagg

SEQ ID NO: 1662 - DNA, 23 bp, Homo sapiens
  source 1..23: mol_type = other DNA
cacaggcaacccagggagtcgag

SEQ ID NO: 1663 - DNA, 23 bp, Homo sapiens
  source 1..23: mol_type = other DNA
aatataataaccagtgaatctgg

SEQ ID NO: 1664 - DNA, 23 bp, Homo sapiens
  source 1..23: mol_type = other DNA
tattagttaaacaatgagtcagg

SEQ ID NO: 1665 - DNA, 23 bp, Homo sapiens
  source 1..23: mol_type = other DNA
tataaggaaaccagtcatactgg

SEQ ID NO: 1666 - DNA, 23 bp, Homo sapiens
  source 1..23: mol_type = other DNA
tataggaatacctgtgatatttg

SEQ ID NO: 1667 - DNA, 23 bp, Homo sapiens
  source 1..23: mol_type = other DNA
caaaggaaaaacagtgagttgat

SEQ ID NO: 1668 - DNA, 23 bp, Homo sapiens
  source 1..23: mol_type = other DNA
tgaaggaaaagaagtgaatcagg

SEQ ID NO: 1669 - DNA, 23 bp, Homo sapiens
  source 1..23: mol_type = other DNA
gataggaaaacctatgattttgg

SEQ ID NO: 1670 - DNA, 22 bp, Homo sapiens
  source 1..22: mol_type = other DNA
tatagaggatcagtgagtctag

SEQ ID NO: 1671 - DNA, 22 bp, Homo sapiens
  source 1..22: mol_type = other DNA
tataagagagccagtgagctga

SEQ ID NO: 1672 - DNA, 21 bp, Homo sapiens
  source 1..21: mol_type = other DNA
aatagaaagaccagtgtctgg

SEQ ID NO: 1673 - DNA, 23 bp, Homo sapiens
  source 1..23: mol_type = other DNA
tgtaggaaaaccagtgaagctct

SEQ ID NO: 1674 - DNA, 23 bp, Homo sapiens
  source 1..23: mol_type = other DNA
aacaggaaaaccagttggtgggt

SEQ ID NO: 1675 - DNA, 23 bp, Homo sapiens
  source 1..23: mol_type = other DNA
tttaggaattccagtgattttga

SEQ ID NO: 1676 - DNA, 23 bp, Homo sapiens
  source 1..23: mol_type = other DNA
tatataaacaccagagagactgt

SEQ ID NO: 1677 - DNA, 23 bp, Homo sapiens
  source 1..23: mol_type = other DNA
tatagaaagtacagtgattctgg

SEQ ID NO: 1678 - DNA, 23 bp, Homo sapiens
  source 1..23: mol_type = other DNA
tatagtggaaccagtgtgtaagt

SEQ ID NO: 1679 - DNA, 23 bp, Homo sapiens
  source 1..23: mol_type = other DNA
tttagaaaaagcagagagtccta

SEQ ID NO: 1680 - DNA, 23 bp, Homo sapiens
  source 1..23: mol_type = other DNA
aatagttaaaacagtgagaccgg

SEQ ID NO: 1681 - DNA, 23 bp, Homo sapiens
  source 1..23: mol_type = other DNA
cctaggaaatccagctagtcctg

SEQ ID NO: 1682 - DNA, 23 bp, Homo sapiens
  source 1..23: mol_type = other DNA
tatgaataagccagtgattcagg

SEQ ID NO: 1683 - DNA, 23 bp, Homo sapiens
  source 1..23: mol_type = other DNA
tataaaggaaccagtgataccgg

SEQ ID NO: 1684 - DNA, 23 bp, Homo sapiens
  source 1..23: mol_type = other DNA
tgtactaaaaccagtgacttacg

SEQ ID NO: 1685 - DNA, 23 bp, Homo sapiens
  source 1..23: mol_type = other DNA
aatatgtaaacaagtgagcatgg

SEQ ID NO: 1686 - DNA, 23 bp, Homo sapiens
  source 1..23: mol_type = other DNA
tataggaaaacttgtgtcatggg

SEQ ID NO: 1687 - DNA, 23 bp, Homo sapiens
  source 1..23: mol_type = other DNA
tataggaaataaagtgaataagg

SEQ ID NO: 1688 - DNA, 24 bp, Homo sapiens
  source 1..24: mol_type = other DNA
tataggaaaacaagttgtctctgg

SEQ ID NO: 1689 - DNA, 22 bp, Homo sapiens
  source 1..22: mol_type = other DNA
tataggaaaaccatgggacaaa

SEQ ID NO: 1690 - DNA, 22 bp, Homo sapiens
  source 1..22: mol_type = other DNA
tatagggaaactagtagcaggg

SEQ ID NO: 1691 - DNA, 21 bp, Homo sapiens
  source 1..21: mol_type = other DNA
tgtaggaaaaagtgattccag

SEQ ID NO: 1692 - DNA, 21 bp, Homo sapiens
  source 1..21: mol_type = other DNA
gataggaaaacaagtgcctgg

SEQ ID NO: 1693 - DNA, 22 bp, Homo sapiens
  source 1..22: mol_type = other DNA
taaagaaaatgcagtggtcggg

SEQ ID NO: 1694 - DNA, 22 bp, Homo sapiens
  source 1..22: mol_type = other DNA
aatagaaaaaccactggtcaga

SEQ ID NO: 1695 - DNA, 23 bp, Homo sapiens
  source 1..23: mol_type = other DNA
cacaggaaaagcaatgagaccag

SEQ ID NO: 1696 - DNA, 23 bp, Homo sapiens
  source 1..23: mol_type = other DNA
aataggagaaagagagagtgagg

SEQ ID NO: 1697 - DNA, 23 bp, Homo sapiens
  source 1..23: mol_type = other DNA
tataggtaaacccatgtcacagg

SEQ ID NO: 1698 - DNA, 23 bp, Homo sapiens
  source 1..23: mol_type = other DNA
cctaacaaaactagtgtgtctgg

SEQ ID NO: 1699 - DNA, 23 bp, Homo sapiens
  source 1..23: mol_type = other DNA
cagagtaaaacaggtgaggcagg

SEQ ID NO: 1700 - DNA, 23 bp, Homo sapiens
  source 1..23: mol_type = other DNA
taaaggaaaacaaatgggccatg

SEQ ID NO: 1701 - DNA, 23 bp, Homo sapiens
  source 1..23: mol_type = other DNA
tataataaaaccagtgacaaagt

SEQ ID NO: 1702 - DNA, 23 bp, Homo sapiens
  source 1..23: mol_type = other DNA
tatagcaaaacacctgagactgg

SEQ ID NO: 1703 - DNA, 23 bp, Homo sapiens
  source 1..23: mol_type = other DNA
cagaggaaaagcagagagccttg

SEQ ID NO: 1704 - DNA, 23 bp, Homo sapiens
  source 1..23: mol_type = other DNA
cttaggaaaaccaatgagagaag

SEQ ID NO: 1705 - DNA, 23 bp, Homo sapiens
  source 1..23: mol_type = other DNA
cttaggaaaaccaaaaattctgg

SEQ ID NO: 1706 - DNA, 23 bp, Homo sapiens
  source 1..23: mol_type = other DNA
tataggaaaatcagtgagaactc

SEQ ID NO: 1707 - DNA, 23 bp, Homo sapiens
  source 1..23: mol_type = other DNA
tataggtaatctagtgagacagc

SEQ ID NO: 1708 - DNA, 23 bp, Homo sapiens
  source 1..23: mol_type = other DNA
agtaggaaaacctgggagttgga

SEQ ID NO: 1709 - DNA, 23 bp, Homo sapiens
  source 1..23: mol_type = other DNA
tctacaaaaaacagttaggctgg

SEQ ID NO: 1710 - DNA, 23 bp, Homo sapiens
  source 1..23: mol_type = other DNA
tgtaaggaaaccagtcagattgg

SEQ ID NO: 1711 - DNA, 24 bp, Homo sapiens
  source 1..24: mol_type = other DNA
tatgggaaaagccagtgaggcaag

SEQ ID NO: 1712 - DNA, 22 bp, Homo sapiens
  source 1..22: mol_type = other DNA
catagtaaaaacatgtgtcagg

SEQ ID NO: 1713 - DNA, 22 bp, Homo sapiens
  source 1..22: mol_type = other DNA
tgtatgcaaaccaggggtcagg

SEQ ID NO: 1714 - DNA, 22 bp, Homo sapiens
  source 1..22: mol_type = other DNA
tataggtaaaacagtaggctgc

SEQ ID NO: 1715 - DNA, 22 bp, Homo sapiens
  source 1..22: mol_type = other DNA
cataagaaaaccagtgttcagt

SEQ ID NO: 1716 - DNA, 21 bp, Homo sapiens
  source 1..21: mol_type = other DNA
taaaggaaaaagtgagtttag

SEQ ID NO: 1717 - DNA, 23 bp, Homo sapiens
  source 1..23: mol_type = other DNA
tgtaggaaaaccagtaagtaggt

SEQ ID NO: 1718 - DNA, 22 bp, Homo sapiens
  source 1..22: mol_type = other DNA
cataggaaaccaatgagctagg

SEQ ID NO: 1719 - DNA, 22 bp, Homo sapiens
  source 1..22: mol_type = other DNA
tgtaggtaacctttgagtcagg

SEQ ID NO: 1720 - DNA, 23 bp, Homo sapiens
  source 1..23: mol_type = other DNA
gacaggaaaaccagtgagtaggc

SEQ ID NO: 1721 - DNA, 22 bp, Homo sapiens
  source 1..22: mol_type = other DNA
tgtaggaaatcaatgagtcaag

SEQ ID NO: 1722 - DNA, 23 bp, Homo sapiens
  source 1..23: mol_type = other DNA
tataagataaccagtgaatctgt

SEQ ID NO: 1723 - DNA, 24 bp, Homo sapiens
  source 1..24: mol_type = other DNA
tatagtaaaaccgagtgagcagga

SEQ ID NO: 1724 - DNA, 23 bp, Homo sapiens
  source 1..23: mol_type = other DNA
attaggaaaaccagttagtagga

SEQ ID NO: 1725 - DNA, 21 bp, Homo sapiens
  source 1..21: mol_type = other DNA
attaggaaaaccagtgaaagg

SEQ ID NO: 1726 - DNA, 22 bp, Homo sapiens
  source 1..22: mol_type = other DNA
cataggaaaaccaatgtactgg

SEQ ID NO: 1727 - DNA, 23 bp, Homo sapiens
  source 1..23: mol_type = other DNA
aatgggaaaaccagtgagacggg

SEQ ID NO: 1728 - DNA, 24 bp, Homo sapiens
  source 1..24: mol_type = other DNA
tataggttaaaccagtgattgggt

SEQ ID NO: 1729 - DNA, 22 bp, Homo sapiens
  source 1..22: mol_type = other DNA
tatttaaaaccagtgagtttgg

SEQ ID NO: 1730 - DNA, 22 bp, Homo sapiens
  source 1..22: mol_type = other DNA
gatagggaaacctgtgatctgg

SEQ ID NO: 1731 - DNA, 23 bp, Homo sapiens
  source 1..23: mol_type = other DNA
agtaggaaagccagtgagcaaga

SEQ ID NO: 1732 - DNA, 23 bp, Homo sapiens
  source 1..23: mol_type = other DNA
tataagaaaaccagttataagga

SEQ ID NO: 1733 - DNA, 22 bp, Homo sapiens
  source 1..22: mol_type = other DNA
tgtagtaaaaccaggaatcaag

SEQ ID NO: 1734 - DNA, 23 bp, Homo sapiens
  source 1..23: mol_type = other DNA
aatagtaaaatcagtgagtggtt

SEQ ID NO: 1735 - DNA, 21 bp, Homo sapiens
  source 1..21: mol_type = other DNA
tctaggaaacagtgagtcatg

SEQ ID NO: 1736 - DNA, 22 bp, Homo sapiens
  source 1..22: mol_type = other DNA
aatagtgaaaccagaagtcagg

SEQ ID NO: 1737 - DNA, 22 bp, Homo sapiens
  source 1..22: mol_type = other DNA
cttaggaaaatcaggtgtcagg

SEQ ID NO: 1738 - DNA, 22 bp, Homo sapiens
  source 1..22: mol_type = other DNA
tatagtaaaaccagagatctga

SEQ ID NO: 1739 - DNA, 22 bp, Homo sapiens
  source 1..22: mol_type = other DNA
tgtaggagaaacatgagtctgg

SEQ ID NO: 1740 - DNA, 23 bp, Homo sapiens
  source 1..23: mol_type = other DNA
tataagataaccactgagtctga

SEQ ID NO: 1741 - DNA, 23 bp, Homo sapiens
  source 1..23: mol_type = other DNA
tgaaggaaaaccagggagctgga

SEQ ID NO: 1742 - DNA, 23 bp, Homo sapiens
  source 1..23: mol_type = other DNA
aattataaaaccagagagtcatg

SEQ ID NO: 1743 - DNA, 23 bp, Homo sapiens
  source 1..23: mol_type = other DNA
aataggataaccaattagttggt

SEQ ID NO: 1744 - DNA, 23 bp, Homo sapiens
  source 1..23: mol_type = other DNA
tgtaggagaaccaatgatttcag

SEQ ID NO: 1745 - DNA, 23 bp, Homo sapiens
  source 1..23: mol_type = other DNA
ccaaaggaaaccagtgagtccga

SEQ ID NO: 1746 - DNA, 23 bp, Homo sapiens
  source 1..23: mol_type = other DNA
aaatggaaaaccagtgagcaggg

SEQ ID NO: 1747 - DNA, 22 bp, Homo sapiens
  source 1..22: mol_type = other DNA
ttgaggaaaaccagtatttagg

SEQ ID NO: 1748 - DNA, 23 bp, Homo sapiens
  source 1..23: mol_type = other DNA
tatagataaaccagtgtcatggg

SEQ ID NO: 1749 - DNA, 22 bp, Homo sapiens
  source 1..22: mol_type = other DNA
agtttgaaaaccagtggtcagg

SEQ ID NO: 1750 - DNA, 22 bp, Homo sapiens
  source 1..22: mol_type = other DNA
tataggtcagccagtaatcagg

SEQ ID NO: 1751 - DNA, 21 bp, Homo sapiens
  source 1..21: mol_type = other DNA
aataggaaaacctgtgtcagg

SEQ ID NO: 1752 - DNA, 22 bp, Homo sapiens
  source 1..22: mol_type = other DNA
tatagaaaaacagagagtcaga

SEQ ID NO: 1753 - DNA, 23 bp, Homo sapiens
  source 1..23: mol_type = other DNA
aataagagaaccagtgaaatggg

SEQ ID NO: 1754 - DNA, 21 bp, Homo sapiens
  source 1..21: mol_type = other DNA
aataggtcacagtgagtcagg

SEQ ID NO: 1755 - DNA, 23 bp, Homo sapiens
  source 1..23: mol_type = other DNA
acaaggaaaaacagtgagtaagt

SEQ ID NO: 1756 - DNA, 23 bp, Homo sapiens
  source 1..23: mol_type = other DNA
tgaaggaaaactagtgagacaag

SEQ ID NO: 1757 - DNA, 22 bp, Homo sapiens
  source 1..22: mol_type = other DNA
tatagggtagcaatgagtcagg

SEQ ID NO: 1758 - DNA, 24 bp, Homo sapiens
  source 1..24: mol_type = other DNA
tatagtgaaaaccaatgaatctag

SEQ ID NO: 1759 - DNA, 22 bp, Homo sapiens
  source 1..22: mol_type = other DNA
tgtaggaataccagaggttggg

SEQ ID NO: 1760 - DNA, 23 bp, Homo sapiens
  source 1..23: mol_type = other DNA
tataagattaccagtgaatctgt

SEQ ID NO: 1761 - DNA, 22 bp, Homo sapiens
  source 1..22: mol_type = other DNA
tacaggaaaccagtgagggctg

SEQ ID NO: 1762 - DNA, 22 bp, Homo sapiens
  source 1..22: mol_type = other DNA
aaaattaaaaccagtggtctgg

SEQ ID NO: 1763 - DNA, 22 bp, Homo sapiens
  source 1..22: mol_type = other DNA
gacagaaaaccagagagtaggg

SEQ ID NO: 1764 - DNA, 22 bp, Homo sapiens
  source 1..22: mol_type = other DNA
tttagtaaaaccactggtctgg

SEQ ID NO: 1765 - DNA, 23 bp, Homo sapiens
  source 1..23: mol_type = other DNA
tataggaaaacttatgagtagga

SEQ ID NO: 1766 - DNA, 23 bp, Homo sapiens
  source 1..23: mol_type = other DNA
attaagaaaaccagtatctctgg

SEQ ID NO: 1767 - DNA, 22 bp, Homo sapiens
  source 1..22: mol_type = other DNA
tatagggaaaaagtgagtcaga

SEQ ID NO: 1768 - DNA, 21 bp, Homo sapiens
  source 1..21: mol_type = other DNA
tataggtaccactgagcctgg

SEQ ID NO: 1769 - DNA, 23 bp, Homo sapiens
  source 1..23: mol_type = other DNA
tatagtaaaaccagtaggtggca

SEQ ID NO: 1770 - DNA, 22 bp, Homo sapiens
  source 1..22: mol_type = other DNA
tgtagaacaccattaagtctgg

SEQ ID NO: 1771 - DNA, 22 bp, Homo sapiens
  source 1..22: mol_type = other DNA
gttaggagaaacagtgatcagg

SEQ ID NO: 1772 - DNA, 22 bp, Homo sapiens
  source 1..22: mol_type = other DNA
gagaggaaaaccaggagtaagg

SEQ ID NO: 1773 - DNA, 24 bp, Homo sapiens
  source 1..24: mol_type = other DNA
tataggaaataccagagagaaggg

SEQ ID NO: 1774 - DNA, 23 bp, Homo sapiens
  source 1..23: mol_type = other DNA
tgtatgaaaatcagtaagtcggc

SEQ ID NO: 1775 - DNA, 22 bp, Homo sapiens
  source 1..22: mol_type = other DNA
cagaggaaaaccaatgctcagg

SEQ ID NO: 1776 - DNA, 23 bp, Homo sapiens
  source 1..23: mol_type = other DNA
taggggaaagccagtgagccagg

SEQ ID NO: 1777 - DNA, 24 bp, Homo sapiens
  source 1..24: mol_type = other DNA
gatagggaagaccaatgagtttgg

SEQ ID NO: 1778 - DNA, 22 bp, Homo sapiens
  source 1..22: mol_type = other DNA
tctaataaacaagtgagtcagg

SEQ ID NO: 1779 - DNA, 21 bp, Homo sapiens
  source 1..21: mol_type = other DNA
tatagatcaaccagtgtcagg

SEQ ID NO: 1780 - DNA, 23 bp, Homo sapiens
  source 1..23: mol_type = other DNA
aataggaaaaacagtgaaatgag

SEQ ID NO: 1781 - DNA, 24 bp, Homo sapiens
  source 1..24: mol_type = other DNA
aataggagaatcagtgtattcagg

SEQ ID NO: 1782 - DNA, 23 bp, Homo sapiens
  source 1..23: mol_type = other DNA
ctaaggaacaccagtgagtctgg

SEQ ID NO: 1783 - DNA, 22 bp, Homo sapiens
  source 1..22: mol_type = other DNA
tctaggtacacagtgagtcatg

SEQ ID NO: 1784 - DNA, 22 bp, Homo sapiens
  source 1..22: mol_type = other DNA
tatagtaaaaccatgagtatag

SEQ ID NO: 1785 - DNA, 22 bp, Homo sapiens
  source 1..22: mol_type = other DNA
tcatggaaaaccatgagtatgg

SEQ ID NO: 1786 - DNA, 23 bp, Homo sapiens
  source 1..23: mol_type = other DNA
tacaggaaaatgagtgagtccgg

SEQ ID NO: 1787 - DNA, 22 bp, Homo sapiens
  source 1..22: mol_type = other DNA
gatatgaaaacagtgagtgagt

SEQ ID NO: 1788 - DNA, 21 bp, Homo sapiens
  source 1..21: mol_type = other DNA
tttaaaaaccactgagtcaga

SEQ ID NO: 1789 - DNA, 21 bp, Homo sapiens
  source 1..21: mol_type = other DNA
gaaaggaaacagtaagtcagg

SEQ ID NO: 1790 - DNA, 21 bp, Homo sapiens
  source 1..21: mol_type = other DNA
aatagaaaccagtgggtcaag

SEQ ID NO: 1791 - DNA, 23 bp, Homo sapiens
  source 1..23: mol_type = other DNA
agaaagaaaaccacagagtcggg

SEQ ID NO: 1792 - DNA, 23 bp, Homo sapiens
  source 1..23: mol_type = other DNA
tataggaaaacaggtgaccaggg

SEQ ID NO: 1793 - DNA, 23 bp, Homo sapiens
  source 1..23: mol_type = other DNA
cataagaaaaccaatgaataaga

SEQ ID NO: 1794 - DNA, 22 bp, Homo sapiens
  source 1..22: mol_type = other DNA
tgtagaacaaccagtagtctgc

SEQ ID NO: 1795 - DNA, 23 bp, Homo sapiens
  source 1..23: mol_type = other DNA
tataggtaaactagtggcatggg

SEQ ID NO: 1796 - DNA, 22 bp, Homo sapiens
  source 1..22: mol_type = other DNA
aataggaaacaagtgtgtcatg

SEQ ID NO: 1797 - DNA, 23 bp, Homo sapiens
  source 1..23: mol_type = other DNA
tataggtaaacaagtgagatggt

SEQ ID NO: 1798 - DNA, 23 bp, Homo sapiens
  source 1..23: mol_type = other DNA
aatagtaagacctgtgagtaaag

SEQ ID NO: 1799 - DNA, 22 bp, Homo sapiens
  source 1..22: mol_type = other DNA
aaaaggaaaaccaagaatcagg

SEQ ID NO: 1800 - DNA, 23 bp, Homo sapiens
  source 1..23: mol_type = other DNA
tagaggaaggccagtgagtcgag

SEQ ID NO: 1801 - DNA, 22 bp, Homo sapiens
  source 1..22: mol_type = other DNA
tctgagaaaaccagtagtaagg

SEQ ID NO: 1802 - DNA, 23 bp, Homo sapiens
  source 1..23: mol_type = other DNA
gaaagggaaaccagtgaggtagg

SEQ ID NO: 1803 - DNA, 22 bp, Homo sapiens
  source 1..22: mol_type = other DNA
tatccaaaaaccagagatccgg

SEQ ID NO: 1804 - DNA, 24 bp, Homo sapiens
  source 1..24: mol_type = other DNA
tgaaggaaacccagtgaagtctgg

SEQ ID NO: 1805 - DNA, 21 bp, Homo sapiens
  source 1..21: mol_type = other DNA
cactggaaacagtgagtccgg

SEQ ID NO: 1806 - DNA, 22 bp, Homo sapiens
  source 1..22: mol_type = other DNA
aatatgaaaccagtgagtatgc

SEQ ID NO: 1807 - DNA, 22 bp, Homo sapiens
  source 1..22: mol_type = other DNA
gctaggaaaccagtgaggacgg

SEQ ID NO: 1808 - DNA, 22 bp, Homo sapiens
  source 1..22: mol_type = other DNA
accaggaataccagtagtctgg

SEQ ID NO: 1809 - DNA, 23 bp, Homo sapiens
  source 1..23: mol_type = other DNA
cagaggaaaaacactgagtcagg

SEQ ID NO: 1810 - DNA, 23 bp, Homo sapiens
  source 1..23: mol_type = other DNA
ttcctgaaaaccaatgagtcaga

SEQ ID NO: 1811 - DNA, 23 bp, Homo sapiens
  source 1..23: mol_type = other DNA
aagataagaaccagtgagactgg

SEQ ID NO: 1812 - DNA, 23 bp, Homo sapiens
  source 1..23: mol_type = other DNA
agggggataaccactgagtcagg

SEQ ID NO: 1813 - DNA, 22 bp, Homo sapiens
  source 1..22: mol_type = other DNA
tggagaaaaccagtgagtgtag

SEQ ID NO: 1814 - DNA, 23 bp, Homo sapiens
  source 1..23: mol_type = other DNA
tctaagaaaactagagagtgggt

SEQ ID NO: 1815 - DNA, 23 bp, Homo sapiens
  source 1..23: mol_type = other DNA
tgaactaaaaccagtaagtcagg

SEQ ID NO: 1816 - DNA, 23 bp, Homo sapiens
  source 1..23: mol_type = other DNA
cagaagaaaaccagtgagtttga

SEQ ID NO: 1817 - DNA, 23 bp, Homo sapiens
  source 1..23: mol_type = other DNA
tataggtaaacaggtgtcacggg

SEQ ID NO: 1818 - DNA, 23 bp, Homo sapiens
  source 1..23: mol_type = other DNA
ttcagggataccagtgagtcata

SEQ ID NO: 1819 - DNA, 23 bp, Homo sapiens
  source 1..23: mol_type = other DNA
aaaaggaaaaaaagtgagtctgg

SEQ ID NO: 1820 - DNA, 23 bp, Homo sapiens
  source 1..23: mol_type = other DNA
tagagataaacgggtgagtcggt

SEQ ID NO: 1821 - DNA, 22 bp, Homo sapiens
  source 1..22: mol_type = other DNA
tataggaaagccaatagtaggt

SEQ ID NO: 1822 - DNA, 22 bp, Homo sapiens
  source 1..22: mol_type = other DNA
tatagattacaagtgagtttgg

SEQ ID NO: 1823 - DNA, 23 bp, Homo sapiens
  source 1..23: mol_type = other DNA
ataagtaaaaccagtgattcatg

SEQ ID NO: 1824 - DNA, 23 bp, Homo sapiens
  source 1..23: mol_type = other DNA
cagaaaaaaatcagtgagtcagg

SEQ ID NO: 1825 - DNA, 23 bp, Homo sapiens
  source 1..23: mol_type = other DNA
actaggagaactaatgagtgggg

SEQ ID NO: 1826 - DNA, 23 bp, Homo sapiens
  source 1..23: mol_type = other DNA
ggtaggatagccagtgagatggg

SEQ ID NO: 1827 - DNA, 23 bp, Homo sapiens
  source 1..23: mol_type = other DNA
tataggaatgtcagtgatttttg

SEQ ID NO: 1828 - DNA, 23 bp, Homo sapiens
  source 1..23: mol_type = other DNA
tataggaagaccagagagcaata

SEQ ID NO: 1829 - DNA, 23 bp, Homo sapiens
  source 1..23: mol_type = other DNA
cttaagaaaactagtaagtctga

SEQ ID NO: 1830 - DNA, 23 bp, Homo sapiens
  source 1..23: mol_type = other DNA
actgagaaaaccagagaggctgg

SEQ ID NO: 1831 - DNA, 22 bp, Homo sapiens
  source 1..22: mol_type = other DNA
aatatgaatccagtgagtctga

SEQ ID NO: 1832 - DNA, 23 bp, Homo sapiens
  source 1..23: mol_type = other DNA
aataggaaaacaaatgagcctgc

SEQ ID NO: 1833 - DNA, 23 bp, Homo sapiens
  source 1..23: mol_type = other DNA
tataggaaagcaagggagaaggc

SEQ ID NO: 1834 - DNA, 23 bp, Homo sapiens
  source 1..23: mol_type = other DNA
tataggaacaccagtaattggat

SEQ ID NO: 1835 - DNA, 23 bp, Homo sapiens
  source 1..23: mol_type = other DNA
tataggaaaaatagtgttttggt

SEQ ID NO: 1836 - DNA, 23 bp, Homo sapiens
  source 1..23: mol_type = other DNA
aataggaataccactgaatctgt

SEQ ID NO: 1837 - DNA, 22 bp, Homo sapiens
  source 1..22: mol_type = other DNA
tctagaaaagcagtgattctgg

SEQ ID NO: 1838 - DNA, 22 bp, Homo sapiens
  source 1..22: mol_type = other DNA
aaaaggaaaactgtaagtcagg

SEQ ID NO: 1839 - DNA, 23 bp, Homo sapiens
  source 1..23: mol_type = other DNA
attggttaatccagtgagtctgg

SEQ ID NO: 1840 - DNA, 23 bp, Homo sapiens
  source 1..23: mol_type = other DNA
taaaggaataccagagactgggt

SEQ ID NO: 1841 - DNA, 23 bp, Homo sapiens
  source 1..23: mol_type = other DNA
tataggagaatcagtaaatctga

SEQ ID NO: 1842 - DNA, 23 bp, Homo sapiens
  source 1..23: mol_type = other DNA
aatggaaaaaccaggaagtctgg

SEQ ID NO: 1843 - DNA, 23 bp, Homo sapiens
  source 1..23: mol_type = other DNA
tacaggaaaaacagttattcaat

SEQ ID NO: 1844 - DNA, 23 bp, Homo sapiens
  source 1..23: mol_type = other DNA
tatgggaaaaaaagagattcgga

SEQ ID NO: 1845 - DNA, 23 bp, Homo sapiens
  source 1..23: mol_type = other DNA
aattggaaaaacagagagtcaac

SEQ ID NO: 1846 - DNA, 23 bp, Homo sapiens
  source 1..23: mol_type = other DNA
tataggtaaactagtgtcatggg

SEQ ID NO: 1847 - DNA, 23 bp, Homo sapiens
  source 1..23: mol_type = other DNA
aatagaaaaactagtgagattag

SEQ ID NO: 1848 - DNA, 23 bp, Homo sapiens
  source 1..23: mol_type = other DNA
tgtaggcaaactagtggttgggg

SEQ ID NO: 1849 - DNA, 23 bp, Homo sapiens
  source 1..23: mol_type = other DNA
tataggaaaacttgtaaatctaa

SEQ ID NO: 1850 - DNA, 24 bp, Homo sapiens
  source 1..24: mol_type = other DNA
tttaggaaaaccaagtgcttctga

SEQ ID NO: 1851 - DNA, 24 bp, Homo sapiens
  source 1..24: mol_type = other DNA
aatagaaaaaccagttgagtcttt

SEQ ID NO: 1852 - DNA, 22 bp, Homo sapiens
  source 1..22: mol_type = other DNA
tataataaatcagtgagtctga

SEQ ID NO: 1853 - DNA, 22 bp, Homo sapiens
  source 1..22: mol_type = other DNA
aatataaaaccagtgagggagg

SEQ ID NO: 1854 - DNA, 22 bp, Homo sapiens
  source 1..22: mol_type = other DNA
tagaggtacccaatgagtctgg

SEQ ID NO: 1855 - DNA, 22 bp, Homo sapiens
  source 1..22: mol_type = other DNA
aataggaaaccatttagttagg

SEQ ID NO: 1856 - DNA, 22 bp, Homo sapiens
  source 1..22: mol_type = other DNA
tgcaggaagccagtgaatcagg

SEQ ID NO: 1857 - DNA, 21 bp, Homo sapiens
  source 1..21: mol_type = other DNA
tgtaggaatacctgagactgg

SEQ ID NO: 1858 - DNA, 21 bp, Homo sapiens
  source 1..21: mol_type = other DNA
tttaaaaatcagtaagtctgg

SEQ ID NO: 1859 - DNA, 23 bp, Homo sapiens
  source 1..23: mol_type = other DNA
tatagagaaacaagtgagcccag

SEQ ID NO: 1860 - DNA, 23 bp, Homo sapiens
  source 1..23: mol_type = other DNA
aatagcaaaacaagagagtgtgt

SEQ ID NO: 1861 - DNA, 23 bp, Homo sapiens
  source 1..23: mol_type = other DNA
tggagaaaagccagtgagtagag

SEQ ID NO: 1862 - DNA, 23 bp, Homo sapiens
  source 1..23: mol_type = other DNA
tatactaaaaccaatgagttgta

SEQ ID NO: 1863 - DNA, 23 bp, Homo sapiens
  source 1..23: mol_type = other DNA
tgtaggaaaacaagaaaaactgg

SEQ ID NO: 1864 - DNA, 23 bp, Homo sapiens
  source 1..23: mol_type = other DNA
tataggaaaattagacattaagg

SEQ ID NO: 1865 - DNA, 23 bp, Homo sapiens
  source 1..23: mol_type = other DNA
tctagaaaaatcagttagtttgc

SEQ ID NO: 1866 - DNA, 23 bp, Homo sapiens
  source 1..23: mol_type = other DNA
catagaaaaaccaatgagtgata

SEQ ID NO: 1867 - DNA, 23 bp, Homo sapiens
  source 1..23: mol_type = other DNA
tatatgaaaaccagtgttgcatt

SEQ ID NO: 1868 - DNA, 23 bp, Homo sapiens
  source 1..23: mol_type = other DNA
gataggaataccactgaatctat

SEQ ID NO: 1869 - DNA, 23 bp, Homo sapiens
  source 1..23: mol_type = other DNA
tataaggcaacaagttagccagg

SEQ ID NO: 1870 - DNA, 23 bp, Homo sapiens
  source 1..23: mol_type = other DNA
aagcagataaccagtgattctgg

SEQ ID NO: 1871 - DNA, 23 bp, Homo sapiens
  source 1..23: mol_type = other DNA
tataagagaatcagtgagctaga

SEQ ID NO: 1872 - DNA, 23 bp, Homo sapiens
  source 1..23: mol_type = other DNA
cataggaaaacctgtgtcatggg

SEQ ID NO: 1873 - DNA, 23 bp, Homo sapiens
  source 1..23: mol_type = other DNA
ctttgggaaaccattgaatctgg

SEQ ID NO: 1874 - DNA, 22 bp, Homo sapiens
  source 1..22: mol_type = other DNA
tgaagtaaaaccagcagtcagg

SEQ ID NO: 1875 - DNA, 22 bp, Homo sapiens
  source 1..22: mol_type = other DNA
tggaggaaaaccaggagatggg

SEQ ID NO: 1876 - DNA, 22 bp, Homo sapiens
  source 1..22: mol_type = other DNA
aagaagaaaaccaggagtcagc

SEQ ID NO: 1877 - DNA, 21 bp, Homo sapiens
  source 1..21: mol_type = other DNA
tataggaaaatcagatactgg

SEQ ID NO: 1878 - DNA, 23 bp, Homo sapiens
  source 1..23: mol_type = other DNA
cataggaagaacagtgaaaaggg

SEQ ID NO: 1879 - DNA, 23 bp, Homo sapiens
  source 1..23: mol_type = other DNA
tagggggaagccagtgagtcaag

SEQ ID NO: 1880 - DNA, 23 bp, Homo sapiens
  source 1..23: mol_type = other DNA
aatacgaaaaccagtcaggcgtg

SEQ ID NO: 1881 - DNA, 23 bp, Homo sapiens
  source 1..23: mol_type = other DNA
agtatgaaaacaaatgagttagg

SEQ ID NO: 1882 - DNA, 23 bp, Homo sapiens
  source 1..23: mol_type = other DNA
tatagaaaacccaatcagtgggt

SEQ ID NO: 1883 - DNA, 23 bp, Homo sapiens
  source 1..23: mol_type = other DNA
tataggaattgcattgaatctgc

SEQ ID NO: 1884 - DNA, 23 bp, Homo sapiens
  source 1..23: mol_type = other DNA
tatagcaaaaccaatgagataca

SEQ ID NO: 1885 - DNA, 23 bp, Homo sapiens
  source 1..23: mol_type = other DNA
tttaaaacaactaatgagtctgg

SEQ ID NO: 1886 - DNA, 23 bp, Homo sapiens
  source 1..23: mol_type = other DNA
aataagaaaacctttgagcacgg

SEQ ID NO: 1887 - DNA, 23 bp, Homo sapiens
  source 1..23: mol_type = other DNA
tataggaaattaagtgtatcctg

SEQ ID NO: 1888 - DNA, 23 bp, Homo sapiens
  source 1..23: mol_type = other DNA
aataggaataccactgaatctat

SEQ ID NO: 1889 - DNA, 23 bp, Homo sapiens
  source 1..23: mol_type = other DNA
tataggagaacccatttctcagg

SEQ ID NO: 1890 - DNA, 23 bp, Homo sapiens
  source 1..23: mol_type = other DNA
aataggaaatccagtgattttac

SEQ ID NO: 1891 - DNA, 22 bp, Homo sapiens
  source 1..22: mol_type = other DNA
tataggaaaacattgatttccg

SEQ ID NO: 1892 - DNA, 22 bp, Homo sapiens
  source 1..22: mol_type = other DNA
gataggaaaaccatgagggggt

SEQ ID NO: 1893 - DNA, 22 bp, Homo sapiens
  source 1..22: mol_type = other DNA
tataggaaaccaatgagtgctg

SEQ ID NO: 1894 - DNA, 23 bp, Homo sapiens
  source 1..23: mol_type = other DNA
tgtaagaaaaccagtgaggaggc

SEQ ID NO: 1895 - DNA, 22 bp, Homo sapiens
  source 1..22: mol_type = other DNA
tatagaaaaacagtgagttggg

SEQ ID NO: 1896 - DNA, 22 bp, Homo sapiens
  source 1..22: mol_type = other DNA
cataagaaaccagtgagcctga

SEQ ID NO: 1897 - DNA, 23 bp, Homo sapiens
  source 1..23: mol_type = other DNA
tataggaaatacagtgaatgtgg

SEQ ID NO: 1898 - DNA, 23 bp, Homo sapiens
  source 1..23: mol_type = other DNA
ttataaaaaaccagtgagactgg

SEQ ID NO: 1899 - DNA, 22 bp, Homo sapiens
  source 1..22: mol_type = other DNA
cataagaaaccagtaactctgg

SEQ ID NO: 1900 - DNA, 22 bp, Homo sapiens
  source 1..22: mol_type = other DNA
tatatggtgaccaggagtcagg

SEQ ID NO: 1901 - DNA, 23 bp, Homo sapiens
  source 1..23: mol_type = other DNA
aaacaggaaaccagtgagtctga

SEQ ID NO: 1902 - DNA, 22 bp, Homo sapiens
  source 1..22: mol_type = other DNA
tacaggaaaccagtgagaccag

SEQ ID NO: 1903 - DNA, 22 bp, Homo sapiens
  source 1..22: mol_type = other DNA
agcagcaaaaccagtgagctgg

SEQ ID NO: 1904 - DNA, 22 bp, Homo sapiens
  source 1..22: mol_type = other DNA
tataggaaaaaaatgagtcagg

SEQ ID NO: 1905 - DNA, 23 bp, Homo sapiens
  source 1..23: mol_type = other DNA
cataggagaagcagtgagcagga

SEQ ID NO: 1906 - DNA, 22 bp, Homo sapiens
  source 1..22: mol_type = other DNA
catataaaaaccatgagtcaag

SEQ ID NO: 1907 - DNA, 23 bp, Homo sapiens
  source 1..23: mol_type = other DNA
tataggtaaaccagtgtgatatg

SEQ ID NO: 1908 - DNA, 23 bp, Homo sapiens
  source 1..23: mol_type = other DNA
cataggaatctcagtgagtcagg

SEQ ID NO: 1909 - DNA, 23 bp, Homo sapiens
  source 1..23: mol_type = other DNA
tcctggaaaacaagtgagtcagg

SEQ ID NO: 1910 - DNA, 23 bp, Homo sapiens
  source 1..23: mol_type = other DNA
tttaggaaaaccagtcatccagt

SEQ ID NO: 1911 - DNA, 23 bp, Homo sapiens
  source 1..23: mol_type = other DNA
gcatggaaaaccagtaagtgtgg

SEQ ID NO: 1912 - DNA, 23 bp, Homo sapiens
  source 1..23: mol_type = other DNA
tacaggaaatccagtgagtgctg

SEQ ID NO: 1913 - DNA, 22 bp, Homo sapiens
  source 1..22: mol_type = other DNA
ggtaggaaaactaggagtcaag

SEQ ID NO: 1914 - DNA, 23 bp, Homo sapiens
  source 1..23: mol_type = other DNA
tgttggaaaacaagtgagttagg

SEQ ID NO: 1915 - DNA, 23 bp, Homo sapiens
  source 1..23: mol_type = other DNA
tttagaaaagccagtgagtgggc

SEQ ID NO: 1916 - DNA, 23 bp, Homo sapiens
  source 1..23: mol_type = other DNA
tataagaaaaccagaggtccaga

SEQ ID NO: 1917 - DNA, 23 bp, Homo sapiens
  source 1..23: mol_type = other DNA
caaaggaaaaccagtgagtttaa

SEQ ID NO: 1918 - DNA, 23 bp, Homo sapiens
  source 1..23: mol_type = other DNA
gacaataaaaccaatgagtcagg

SEQ ID NO: 1919 - DNA, 23 bp, Homo sapiens
  source 1..23: mol_type = other DNA
gagaggaaaaccagagagtcagt

SEQ ID NO: 1920 - DNA, 21 bp, Homo sapiens
  source 1..21: mol_type = other DNA
aataggaaaacatgagtctga

SEQ ID NO: 1921 - DNA, 22 bp, Homo sapiens
  source 1..22: mol_type = other DNA
tctataaaaaccgtgagtctgg

SEQ ID NO: 1922 - DNA, 23 bp, Homo sapiens
  source 1..23: mol_type = other DNA
tgaaagaaaaccagagagtttgg

SEQ ID NO: 1923 - DNA, 23 bp, Homo sapiens
  source 1..23: mol_type = other DNA
tctagaaaaaccagtgagctgac

SEQ ID NO: 1924 - DNA, 23 bp, Homo sapiens
  source 1..23: mol_type = other DNA
ttaagggaaaccagtgagctagg

SEQ ID NO: 1925 - DNA, 23 bp, Homo sapiens
  source 1..23: mol_type = other DNA
taaaataaaaccagtgagtctgc

SEQ ID NO: 1926 - DNA, 23 bp, Homo sapiens
  source 1..23: mol_type = other DNA
agtttaaaaaccagtgagtgggg

SEQ ID NO: 1927 - DNA, 22 bp, Homo sapiens
  source 1..22: mol_type = other DNA
cataggaaaacagtgagaactg

SEQ ID NO: 1928 - DNA, 22 bp, Homo sapiens
  source 1..22: mol_type = other DNA
aatagggaagcagtgggtcagg

SEQ ID NO: 1929 - DNA, 23 bp, Homo sapiens
  source 1..23: mol_type = other DNA
tttgtgaaaaccagtgatcctgg

SEQ ID NO: 1930 - DNA, 22 bp, Homo sapiens
  source 1..22: mol_type = other DNA
tacactaaaccagtgagtaggg

SEQ ID NO: 1931 - DNA, 22 bp, Homo sapiens
  source 1..22: mol_type = other DNA
tataggaacacagtgagcccag

SEQ ID NO: 1932 - DNA, 23 bp, Homo sapiens
  source 1..23: mol_type = other DNA
tataggaataccagtcagtggat

SEQ ID NO: 1933 - DNA, 23 bp, Homo sapiens
  source 1..23: mol_type = other DNA
taaaggaataccagagagtaggt

SEQ ID NO: 1934 - DNA, 23 bp, Homo sapiens
  source 1..23: mol_type = other DNA
tagaaaggaaccagtgagtcaag

SEQ ID NO: 1935 - DNA, 22 bp, Homo sapiens
  source 1..22: mol_type = other DNA
agtaggaaaaccatgagtaagc

SEQ ID NO: 1936 - DNA, 22 bp, Homo sapiens
  source 1..22: mol_type = other DNA
aatactaaaaccatgagccagg

SEQ ID NO: 1937 - DNA, 23 bp, Homo sapiens
  source 1..23: mol_type = other DNA
tgtatgtaaaccagtgattacag

SEQ ID NO: 1938 - DNA, 23 bp, Homo sapiens
  source 1..23: mol_type = other DNA
actaggaaaatcagttagtgggg

SEQ ID NO: 1939 - DNA, 23 bp, Homo sapiens
  source 1..23: mol_type = other DNA
tataagaaaaccagttccttggg

SEQ ID NO: 1940 - DNA, 22 bp, Homo sapiens
  source 1..22: mol_type = other DNA
actagtaaaaccagtgatctgt

SEQ ID NO: 1941 - DNA, 23 bp, Homo sapiens
  source 1..23: mol_type = other DNA
ttctggaaaaccagtgaatactg

SEQ ID NO: 1942 - DNA, 23 bp, Homo sapiens
  source 1..23: mol_type = other DNA
tatagggaagccagtaagctgag

SEQ ID NO: 1943 - DNA, 24 bp, Homo sapiens
  source 1..24: mol_type = other DNA
tggaggcaaaaccagtgagttggt

SEQ ID NO: 1944 - DNA, 23 bp, Homo sapiens
  source 1..23: mol_type = other DNA
tacaggaaagccagtgagacagg

SEQ ID NO: 1945 - DNA, 23 bp, Homo sapiens
  source 1..23: mol_type = other DNA
tcatggtaaaccagtgagatagg

SEQ ID NO: 1946 - DNA, 22 bp, Homo sapiens
  source 1..22: mol_type = other DNA
gctaggataaccatgagtatgg

SEQ ID NO: 1947 - DNA, 23 bp, Homo sapiens
  source 1..23: mol_type = other DNA
gataggaaagccagtgagtttag

SEQ ID NO: 1948 - DNA, 25 bp, Homo sapiens
  source 1..25: mol_type = other DNA
tgtagtaaagaaccagtgattaggg

SEQ ID NO: 1949 - DNA, 23 bp, Homo sapiens
  source 1..23: mol_type = other DNA
taaaggaaaaccagtgtttctga

SEQ ID NO: 1950 - DNA, 23 bp, Homo sapiens
  source 1..23: mol_type = other DNA
gcctggaaaaccaatgaggctgg

SEQ ID NO: 1951 - DNA, 23 bp, Homo sapiens
  source 1..23: mol_type = other DNA
tgtaagaaaaaccatgactcagg

SEQ ID NO: 1952 - DNA, 22 bp, Homo sapiens
  source 1..22: mol_type = other DNA
cataggaaggccatgagttggg

SEQ ID NO: 1953 - DNA, 22 bp, Homo sapiens
  source 1..22: mol_type = other DNA
taaaggaaaccagtgggctggg

SEQ ID NO: 1954 - DNA, 23 bp, Homo sapiens
  source 1..23: mol_type = other DNA
aataggtaaaccactgatccaga

SEQ ID NO: 1955 - DNA, 23 bp, Homo sapiens
  source 1..23: mol_type = other DNA
cattaggaaaccagtgattctgt

SEQ ID NO: 1956 - DNA, 21 bp, Homo sapiens
  source 1..21: mol_type = other DNA
tatagtaaaatctgagtctga

SEQ ID NO: 1957 - DNA, 22 bp, Homo sapiens
  source 1..22: mol_type = other DNA
ttaaggttaaccagtgatctgg

SEQ ID NO: 1958 - DNA, 23 bp, Homo sapiens
  source 1..23: mol_type = other DNA
tggggggaaaccagtgagccagg

SEQ ID NO: 1959 - DNA, 22 bp, Homo sapiens
  source 1..22: mol_type = other DNA
gatttgaaaccagtgagtctgg

SEQ ID NO: 1960 - DNA, 22 bp, Homo sapiens
  source 1..22: mol_type = other DNA
tctaaggaagccagtagtcagg

SEQ ID NO: 1961 - DNA, 23 bp, Homo sapiens
  source 1..23: mol_type = other DNA
atgaggaaaagcagtgagttgag

SEQ ID NO: 1962 - DNA, 23 bp, Homo sapiens
  source 1..23: mol_type = other DNA
attaggaaaactagagagactgg

SEQ ID NO: 1963 - DNA, 22 bp, Homo sapiens
  source 1..22: mol_type = other DNA
tatagaaaaccagtgtattctg

SEQ ID NO: 1964 - DNA, 23 bp, Homo sapiens
  source 1..23: mol_type = other DNA
taggagaaaaccggtgaatcagg

SEQ ID NO: 1965 - DNA, 23 bp, Homo sapiens
  source 1..23: mol_type = other DNA
tacaagccaaccagtgagtccag

SEQ ID NO: 1966 - DNA, 23 bp, Homo sapiens
  source 1..23: mol_type = other DNA
actagaaaaaccagtaagtcagt

SEQ ID NO: 1967 - DNA, 23 bp, Homo sapiens
  source 1..23: mol_type = other DNA
taatagcaaagcagtgagttagg

SEQ ID NO: 1968 - DNA, 22 bp, Homo sapiens
  source 1..22: mol_type = other DNA
tataggaaaccagtgagtacca

SEQ ID NO: 1969 - DNA, 21 bp, Homo sapiens
  source 1..21: mol_type = other DNA
cataggtaaacgtgagtcatg

SEQ ID NO: 1970 - DNA, 22 bp, Homo sapiens
  source 1..22: mol_type = other DNA
gatagtaaaacagtgatgcagg

SEQ ID NO: 1971 - DNA, 23 bp, Homo sapiens
  source 1..23: mol_type = other DNA
aataggaaaatctgtggagcagg

SEQ ID NO: 1972 - DNA, 23 bp, Homo sapiens
  source 1..23: mol_type = other DNA
tataggtaaaccagctagtagtt

SEQ ID NO: 1973 - DNA, 23 bp, Homo sapiens
  source 1..23: mol_type = other DNA
tataggaaaaccaatcaatccag

SEQ ID NO: 1974 - DNA, 22 bp, Homo sapiens
  source 1..22: mol_type = other DNA
cataggtaaaccatggctcagg

SEQ ID NO: 1975 - DNA, 23 bp, Homo sapiens
  source 1..23: mol_type = other DNA
tgaaggaaagccagtgagcctgg

SEQ ID NO: 1976 - DNA, 23 bp, Homo sapiens
  source 1..23: mol_type = other DNA
caaaggaaaaccagagaggccgg

SEQ ID NO: 1977 - DNA, 22 bp, Homo sapiens
  source 1..22: mol_type = other DNA
aatgggaaagccatgagtcagg

SEQ ID NO: 1978 - DNA, 23 bp, Homo sapiens
  source 1..23: mol_type = other DNA
tagaggcaaaccagtaagtcaga

SEQ ID NO: 1979 - DNA, 23 bp, Homo sapiens
  source 1..23: mol_type = other DNA
gggagacaaaccagtgagccagg

SEQ ID NO: 1980 - DNA, 22 bp, Homo sapiens
  source 1..22: mol_type = other DNA
tgtgagtaaccagtgagtctgg

SEQ ID NO: 1981 - DNA, 21 bp, Homo sapiens
  source 1..21: mol_type = other DNA
tgcaggaaccagtgagtcatg

SEQ ID NO: 1982 - DNA, 23 bp, Homo sapiens
  source 1..23: mol_type = other DNA
tcacgtaaaaccagtgagtggtg

SEQ ID NO: 1983 - DNA, 22 bp, Homo sapiens
  source 1..22: mol_type = other DNA
gataacaaaaccagtagttggg

SEQ ID NO: 1984 - DNA, 22 bp, Homo sapiens
  source 1..22: mol_type = other DNA
ggtatgaaacccaggagtctgg

SEQ ID NO: 1985 - DNA, 23 bp, Homo sapiens
  source 1..23: mol_type = other DNA
tgaaggaaagccagtgaggtggg

SEQ ID NO: 1986 - DNA, 22 bp, Homo sapiens
  source 1..22: mol_type = other DNA
tttaggagcacagtgagttggg

SEQ ID NO: 1987 - DNA, 22 bp, Homo sapiens
  source 1..22: mol_type = other DNA
cagaagaaaaccattggtctgg

SEQ ID NO: 1988 - DNA, 23 bp, Homo sapiens
  source 1..23: mol_type = other DNA
tataagataaacagtaaatcagg

SEQ ID NO: 1989 - DNA, 23 bp, Homo sapiens
  source 1..23: mol_type = other DNA
tagaggaaaaccaaggactctgg

SEQ ID NO: 1990 - DNA, 23 bp, Homo sapiens
  source 1..23: mol_type = other DNA
tggagttaaaccagtgagccgag

SEQ ID NO: 1991 - DNA, 22 bp, Homo sapiens
  source 1..22: mol_type = other DNA
tgtaggatatctagtgatcagg

SEQ ID NO: 1992 - DNA, 23 bp, Homo sapiens
  source 1..23: mol_type = other DNA
tatacatacaccaatgagtaagg

SEQ ID NO: 1993 - DNA, 23 bp, Homo sapiens
  source 1..23: mol_type = other DNA
tcttgaataaccagtgagtcaaa

SEQ ID NO: 1994 - DNA, 23 bp, Homo sapiens
  source 1..23: mol_type = other DNA
tgaaggaaacccattgaggctga

SEQ ID NO: 1995 - DNA, 24 bp, Homo sapiens
  source 1..24: mol_type = other DNA
tccaggaaaacccagtgagacagg

SEQ ID NO: 1996 - DNA, 22 bp, Homo sapiens
  source 1..22: mol_type = other DNA
tgtaggaagagcaggagtttgg

SEQ ID NO: 1997 - DNA, 22 bp, Homo sapiens
  source 1..22: mol_type = other DNA
tataggaaaaaggtgagtctta

SEQ ID NO: 1998 - DNA, 22 bp, Homo sapiens
  source 1..22: mol_type = other DNA
tataggaaagcaaggagtaggt

SEQ ID NO: 1999 - DNA, 22 bp, Homo sapiens
  source 1..22: mol_type = other DNA
cagaggaagaacagtgagctgg

SEQ ID NO: 2000 - DNA, 23 bp, Homo sapiens
  source 1..23: mol_type = other DNA
tatctggcagccagtcagtctgg

SEQ ID NO: 2001 - DNA, 23 bp, Homo sapiens
  source 1..23: mol_type = other DNA
taaaagtaaaccagtgagtgaag

SEQ ID NO: 2002 - DNA, 23 bp, Homo sapiens
  source 1..23: mol_type = other DNA
tagctgaatacctgtgattcagg

SEQ ID NO: 2003 - DNA, 23 bp, Homo sapiens
  source 1..23: mol_type = other DNA
tataggaatacctgagactgggt

SEQ ID NO: 2004 - DNA, 23 bp, Homo sapiens
  source 1..23: mol_type = other DNA
attaagaaatccagtgaggccgg

SEQ ID NO: 2005 - DNA, 23 bp, Homo sapiens
  source 1..23: mol_type = other DNA
tataggaaacccagaatgtcaag

SEQ ID NO: 2006 - DNA, 23 bp, Homo sapiens
  source 1..23: mol_type = other DNA
attagggaaagcagggattctgg

SEQ ID NO: 2007 - DNA, 23 bp, Homo sapiens
  source 1..23: mol_type = other DNA
taataaaaaatcagtgagtcatg

SEQ ID NO: 2008 - DNA, 22 bp, Homo sapiens
  source 1..22: mol_type = other DNA
gatagaaaacctgtgagcctgg

SEQ ID NO: 2009 - DNA, 21 bp, Homo sapiens
  source 1..21: mol_type = other DNA
tttatgatccagtgagtctgg

SEQ ID NO: 2010 - DNA, 23 bp, Homo sapiens
  source 1..23: mol_type = other DNA
tataagaacaccagtgattggat

SEQ ID NO: 2011 - DNA, 23 bp, Homo sapiens
  source 1..23: mol_type = other DNA
aatatgaaaacaaatgagcttgg

SEQ ID NO: 2012 - DNA, 23 bp, Homo sapiens
  source 1..23: mol_type = other DNA
tctaggaaaaccagtgtcaaaga

SEQ ID NO: 2013 - DNA, 23 bp, Homo sapiens
  source 1..23: mol_type = other DNA
tataagaatgccagtgaggtctg

SEQ ID NO: 2014 - DNA, 23 bp, Homo sapiens
  source 1..23: mol_type = other DNA
catatgtaaactaatgagtctgg

SEQ ID NO: 2015 - DNA, 23 bp, Homo sapiens
  source 1..23: mol_type = other DNA
ttaatgaaaaccagtggtttggg

SEQ ID NO: 2016 - DNA, 22 bp, Homo sapiens
  source 1..22: mol_type = other DNA
tgtaggaaagccattgctcagg

SEQ ID NO: 2017 - DNA, 21 bp, Homo sapiens
  source 1..21: mol_type = other DNA
tggaggaaacagtgagtgtgg

SEQ ID NO: 2018 - DNA, 21 bp, Homo sapiens
  source 1..21: mol_type = other DNA
tttaggaaaatcagactctgg

SEQ ID NO: 2019 - DNA, 23 bp, Homo sapiens
  source 1..23: mol_type = other DNA
tataggaaatccagagtgtgtgg

SEQ ID NO: 2020 - DNA, 23 bp, Homo sapiens
  source 1..23: mol_type = other DNA
tataaggacaccagtgatattgg

SEQ ID NO: 2021 - DNA, 23 bp, Homo sapiens
  source 1..23: mol_type = other DNA
tataggaacaaaagttattttgg

SEQ ID NO: 2022 - DNA, 23 bp, Homo sapiens
  source 1..23: mol_type = other DNA
gaaaggaaaactagtgaacgagg

SEQ ID NO: 2023 - DNA, 23 bp, Homo sapiens
  source 1..23: mol_type = other DNA
taaagaaaaaacaatgagcaagg

SEQ ID NO: 2024 - DNA, 23 bp, Homo sapiens
  source 1..23: mol_type = other DNA
tataggaagcccagtgtattatg

SEQ ID NO: 2025 - DNA, 23 bp, Homo sapiens
  source 1..23: mol_type = other DNA
tatatgaaaacgtgtgactctgt

SEQ ID NO: 2026 - DNA, 22 bp, Homo sapiens
  source 1..22: mol_type = other DNA
cataggaaaacagagagacaga

SEQ ID NO: 2027 - DNA, 22 bp, Homo sapiens
  source 1..22: mol_type = other DNA
tgtaggctaacagtgaatcagg

SEQ ID NO: 2028 - DNA, 22 bp, Homo sapiens
  source 1..22: mol_type = other DNA
tatagggaaacagtgattccaa

SEQ ID NO: 2029 - DNA, 21 bp, Homo sapiens
  source 1..21: mol_type = other DNA
catagaacccagtgagtcagc

SEQ ID NO: 2030 - DNA, 21 bp, Homo sapiens
  source 1..21: mol_type = other DNA
taaaggaatacctgaggcggg

SEQ ID NO: 2031 - DNA, 22 bp, Homo sapiens
  source 1..22: mol_type = other DNA
tttataaaaccagagagtttgg

SEQ ID NO: 2032 - DNA, 22 bp, Homo sapiens
  source 1..22: mol_type = other DNA
tataggataccagtgaaagagg

SEQ ID NO: 2033 - DNA, 22 bp, Homo sapiens
  source 1..22: mol_type = other DNA
tacagcaaaaccatgagccagg

SEQ ID NO: 2034 - DNA, 22 bp, Homo sapiens
  source 1..22: mol_type = other DNA
tgtagcaaaaccatgggtctgc

SEQ ID NO: 2035 - DNA, 22 bp, Homo sapiens
  source 1..22: mol_type = other DNA
tataggtaaaacagtatgctgg

SEQ ID NO: 2036 - DNA, 22 bp, Homo sapiens
  source 1..22: mol_type = other DNA
gaaaggaaaaccagtggtaggc

SEQ ID NO: 2037 - DNA, 23 bp, Homo sapiens
  source 1..23: mol_type = other DNA
tagaaaaaaatcagtgagtgagg

SEQ ID NO: 2038 - DNA, 23 bp, Homo sapiens
  source 1..23: mol_type = other DNA
tttaggaaaaccagcaggacagg

SEQ ID NO: 2039 - DNA, 23 bp, Homo sapiens
  source 1..23: mol_type = other DNA
tggaggaaaactagtgtttctgc

SEQ ID NO: 2040 - DNA, 23 bp, Homo sapiens
  source 1..23: mol_type = other DNA
aataggagagccagtgaatgcag

SEQ ID NO: 2041 - DNA, 23 bp, Homo sapiens
  source 1..23: mol_type = other DNA
aacaggaaaccttgtaagtctgg

SEQ ID NO: 2042 - DNA, 23 bp, Homo sapiens
  source 1..23: mol_type = other DNA
gacaacaaaaccactgggtctgg

SEQ ID NO: 2043 - DNA, 24 bp, Homo sapiens
  source 1..24: mol_type = other DNA
tatacaaaaaccaatgatgtcagg

SEQ ID NO: 2044 - DNA, 21 bp, Homo sapiens
  source 1..21: mol_type = other DNA
tttagaaaccagtgtgtccgg

SEQ ID NO: 2045 - DNA, 22 bp, Homo sapiens
  source 1..22: mol_type = other DNA
tatggaaaaccggtgtgtgggt

SEQ ID NO: 2046 - DNA, 22 bp, Homo sapiens
  source 1..22: mol_type = other DNA
tagaggaaaccagtgagattga

SEQ ID NO: 2047 - DNA, 22 bp, Homo sapiens
  source 1..22: mol_type = other DNA
gataggaaaacaaagagtcaga

SEQ ID NO: 2048 - DNA, 22 bp, Homo sapiens
  source 1..22: mol_type = other DNA
tatagggaacccaggagtgagg

SEQ ID NO: 2049 - DNA, 23 bp, Homo sapiens
  source 1..23: mol_type = other DNA
tctagaaaagagagtgagtctgt

SEQ ID NO: 2050 - DNA, 23 bp, Homo sapiens
  source 1..23: mol_type = other DNA
tatagggaaaccagtaaggtaca

SEQ ID NO: 2051 - DNA, 23 bp, Homo sapiens
  source 1..23: mol_type = other DNA
tataggaacacatgtgggtaagg

SEQ ID NO: 2052 - DNA, 23 bp, Homo sapiens
  source 1..23: mol_type = other DNA
tataggatctgcagtaactccgg

SEQ ID NO: 2053 - DNA, 23 bp, Homo sapiens
  source 1..23: mol_type = other DNA
tattggcaaaacggtgagtctat

SEQ ID NO: 2054 - DNA, 23 bp, Homo sapiens
  source 1..23: mol_type = other DNA
tgtaagaaaaccagtcatgcctg

SEQ ID NO: 2055 - DNA, 23 bp, Homo sapiens
  source 1..23: mol_type = other DNA
tagaagtaaaccagtgggttttg

SEQ ID NO: 2056 - DNA, 23 bp, Homo sapiens
  source 1..23: mol_type = other DNA
tcaaggaaaaacagtgagctgag

SEQ ID NO: 2057 - DNA, 23 bp, Homo sapiens
  source 1..23: mol_type = other DNA
taatagaagaccagtgtgtgtgg

SEQ ID NO: 2058 - DNA, 23 bp, Homo sapiens
  source 1..23: mol_type = other DNA
cacaagaaaagcagctagtctgg

SEQ ID NO: 2059 - DNA, 23 bp, Homo sapiens
  source 1..23: mol_type = other DNA
tagaggaaaactagtgaaatctg

SEQ ID NO: 2060 - DNA, 23 bp, Homo sapiens
  source 1..23: mol_type = other DNA
tataagaatagcattgaatctgt

SEQ ID NO: 2061 - DNA, 22 bp, Homo sapiens
  source 1..22: mol_type = other DNA
tgtaggaaaacagtgtttctga

SEQ ID NO: 2062 - DNA, 22 bp, Homo sapiens
  source 1..22: mol_type = other DNA
tatatgaaaaccagcaatgtgg

SEQ ID NO: 2063 - DNA, 23 bp, Homo sapiens
  source 1..23: mol_type = other DNA
cataggaaaaccagtgagttggg

SEQ ID NO: 2064 - DNA, 22 bp, Homo sapiens
  source 1..22: mol_type = other DNA
tataggacaccagtgaggctgg

SEQ ID NO: 2065 - DNA, 23 bp, Homo sapiens
  source 1..23: mol_type = other DNA
aataggaaaaccagtgtgcagga

SEQ ID NO: 2066 - DNA, 23 bp, Homo sapiens
  source 1..23: mol_type = other DNA
ttgaggaaaaccagtaagtgagt

SEQ ID NO: 2067 - DNA, 23 bp, Homo sapiens
  source 1..23: mol_type = other DNA
tataggaataccagtgatttttg

SEQ ID NO: 2068 - DNA, 22 bp, Homo sapiens
  source 1..22: mol_type = other DNA
tatataaaaccagtgagtgggt

SEQ ID NO: 2069 - DNA, 22 bp, Homo sapiens
  source 1..22: mol_type = other DNA
tgtaggggaccagtgagtcggg

SEQ ID NO: 2070 - DNA, 23 bp, Homo sapiens
  source 1..23: mol_type = other DNA
attgggaaaaccagtgagatggc

SEQ ID NO: 2071 - DNA, 23 bp, Homo sapiens
  source 1..23: mol_type = other DNA
gaatggaaaaccagtgaggctgg

SEQ ID NO: 2072 - DNA, 22 bp, Homo sapiens
  source 1..22: mol_type = other DNA
cataggatatcagtgagtctga

SEQ ID NO: 2073 - DNA, 23 bp, Homo sapiens
  source 1..23: mol_type = other DNA
tagtagaatacaagtgagtctgg

SEQ ID NO: 2074 - DNA, 22 bp, Homo sapiens
  source 1..22: mol_type = other DNA
agtaggaaaacaagtaatctgg

SEQ ID NO: 2075 - DNA, 23 bp, Homo sapiens
  source 1..23: mol_type = other DNA
aataggaaaacaagtgagcatgg

SEQ ID NO: 2076 - DNA, 23 bp, Homo sapiens
  source 1..23: mol_type = other DNA
aatagtgaaaccagggagtcgag

SEQ ID NO: 2077 - DNA, 23 bp, Homo sapiens
  source 1..23: mol_type = other DNA
aataggtaaacaagtgagtgtgg

SEQ ID NO: 2078 - DNA, 23 bp, Homo sapiens
  source 1..23: mol_type = other DNA
aagaggaaaaccagtgagaggat

SEQ ID NO: 2079 - DNA, 22 bp, Homo sapiens
  source 1..22: mol_type = other DNA
aataggaaaaacaggagtgggg

SEQ ID NO: 2080 - DNA, 22 bp, Homo sapiens
  source 1..22: mol_type = other DNA
tataaggaaactatgagtcagg

SEQ ID NO: 2081 - DNA, 23 bp, Homo sapiens
  source 1..23: mol_type = other DNA
aataggaaatcaggtgagtcaag

SEQ ID NO: 2082 - DNA, 23 bp, Homo sapiens
  source 1..23: mol_type = other DNA
tttggtaaaaccagtgagcaggt

SEQ ID NO: 2083 - DNA, 22 bp, Homo sapiens
  source 1..22: mol_type = other DNA
attaggaagcccagtgatctgg

SEQ ID NO: 2084 - DNA, 23 bp, Homo sapiens
  source 1..23: mol_type = other DNA
tctaggaaaaacagtgtgtagga

SEQ ID NO: 2085 - DNA, 22 bp, Homo sapiens
  source 1..22: mol_type = other DNA
tataggaaaacagagatccagg

SEQ ID NO: 2086 - DNA, 22 bp, Homo sapiens
  source 1..22: mol_type = other DNA
tatagggagccagtgagttaga

SEQ ID NO: 2087 - DNA, 23 bp, Homo sapiens
  source 1..23: mol_type = other DNA
tataggaaaatctgtgtgtctgg

SEQ ID NO: 2088 - DNA, 21 bp, Homo sapiens
  source 1..21: mol_type = other DNA
cctaggaaccagtgagtccag

SEQ ID NO: 2089 - DNA, 23 bp, Homo sapiens
  source 1..23: mol_type = other DNA
aaacagaaaaccactgagtcaag

SEQ ID NO: 2090 - DNA, 23 bp, Homo sapiens
  source 1..23: mol_type = other DNA
tgtagcaaaaccagtaaattgga

SEQ ID NO: 2091 - DNA, 23 bp, Homo sapiens
  source 1..23: mol_type = other DNA
tttaaggaaaccaatgagacagg

SEQ ID NO: 2092 - DNA, 22 bp, Homo sapiens
  source 1..22: mol_type = other DNA
aacaggaaaaccctgagtctgg

SEQ ID NO: 2093 - DNA, 23 bp, Homo sapiens
  source 1..23: mol_type = other DNA
tatagaaataccaatgagttatg

SEQ ID NO: 2094 - DNA, 21 bp, Homo sapiens
  source 1..21: mol_type = other DNA
tatagttaccagtgagtttgg

SEQ ID NO: 2095 - DNA, 23 bp, Homo sapiens
  source 1..23: mol_type = other DNA
tatatgaaaaacagtgaattggt

SEQ ID NO: 2096 - DNA, 23 bp, Homo sapiens
  source 1..23: mol_type = other DNA
tgtaggaagaccagtggcttggc

SEQ ID NO: 2097 - DNA, 22 bp, Homo sapiens
  source 1..22: mol_type = other DNA
aataggaatcccaggagtcaag

SEQ ID NO: 2098 - DNA, 22 bp, Homo sapiens
  source 1..22: mol_type = other DNA
cagaggaaaaccatgagtcagc

SEQ ID NO: 2099 - DNA, 23 bp, Homo sapiens
  source 1..23: mol_type = other DNA
tatagggaaaccagtaatattgg

SEQ ID NO: 2100 - DNA, 23 bp, Homo sapiens
  source 1..23: mol_type = other DNA
tatagaaaaaccagcaagacagg

SEQ ID NO: 2101 - DNA, 23 bp, Homo sapiens
  source 1..23: mol_type = other DNA
atttgtaaaaccagagagttggg

SEQ ID NO: 2102 - DNA, 22 bp, Homo sapiens
  source 1..22: mol_type = other DNA
gttaggaaaacagagactctgg

SEQ ID NO: 2103 - DNA, 23 bp, Homo sapiens
  source 1..23: mol_type = other DNA
tatatgaaaaccattgaatggga

SEQ ID NO: 2104 - DNA, 23 bp, Homo sapiens
  source 1..23: mol_type = other DNA
gatagacaagccagtgagtaggt

SEQ ID NO: 2105 - DNA, 23 bp, Homo sapiens
  source 1..23: mol_type = other DNA
tataagaacaccagtaatactgg

SEQ ID NO: 2106 - DNA, 22 bp, Homo sapiens
  source 1..22: mol_type = other DNA
aatagcaaaaccaggaggcagg

SEQ ID NO: 2107 - DNA, 23 bp, Homo sapiens
  source 1..23: mol_type = other DNA
gataggaaaactaatgagtagaa

SEQ ID NO: 2108 - DNA, 22 bp, Homo sapiens
  source 1..22: mol_type = other DNA
tgtatgaaaaccatgaatccag

SEQ ID NO: 2109 - DNA, 22 bp, Homo sapiens
  source 1..22: mol_type = other DNA
tgtagaaaaaccagtcctcagg

SEQ ID NO: 2110 - DNA, 22 bp, Homo sapiens
  source 1..22: mol_type = other DNA
aataataaaaccagagatctgg

SEQ ID NO: 2111 - DNA, 23 bp, Homo sapiens
  source 1..23: mol_type = other DNA
tttaggaaaactagtaagatggg

SEQ ID NO: 2112 - DNA, 23 bp, Homo sapiens
  source 1..23: mol_type = other DNA
tttaaggaatacagtgagtcagg

SEQ ID NO: 2113 - DNA, 21 bp, Homo sapiens
  source 1..21: mol_type = other DNA
ggtaggagaacctgagtctgg

SEQ ID NO: 2114 - DNA, 21 bp, Homo sapiens
  source 1..21: mol_type = other DNA
aataggaagcagtaagtcagg

SEQ ID NO: 2115 - DNA, 23 bp, Homo sapiens
  source 1..23: mol_type = other DNA
agtttgagaaccagtgagtcagg

SEQ ID NO: 2116 - DNA, 23 bp, Homo sapiens
  source 1..23: mol_type = other DNA
gaaaggaaaaacagtgatttggc

SEQ ID NO: 2117 - DNA, 23 bp, Homo sapiens
  source 1..23: mol_type = other DNA
aataaagaaaccagtgagagagg

SEQ ID NO: 2118 - DNA, 23 bp, Homo sapiens
  source 1..23: mol_type = other DNA
catatgaaaaccagtgagtttta

SEQ ID NO: 2119 - DNA, 22 bp, Homo sapiens
  source 1..22: mol_type = other DNA
tataggagaaccatgatttgga

SEQ ID NO: 2120 - DNA, 23 bp, Homo sapiens
  source 1..23: mol_type = other DNA
tatataaaacacagtgagtaggc

SEQ ID NO: 2121 - DNA, 22 bp, Homo sapiens
  source 1..22: mol_type = other DNA
tatagaaaaacagagagtctgc

SEQ ID NO: 2122 - DNA, 23 bp, Homo sapiens
  source 1..23: mol_type = other DNA
aatattataaccaatgagtcagg

SEQ ID NO: 2123 - DNA, 22 bp, Homo sapiens
  source 1..22: mol_type = other DNA
tataagaaaccagtgctgcagg

SEQ ID NO: 2124 - DNA, 22 bp, Homo sapiens
  source 1..22: mol_type = other DNA
catagttaaacagagagtcagg

SEQ ID NO: 2125 - DNA, 23 bp, Homo sapiens
  source 1..23: mol_type = other DNA
tataagaaaacccataagtcagg

SEQ ID NO: 2126 - DNA, 23 bp, Homo sapiens
  source 1..23: mol_type = other DNA
tataaaggaaccaatgagtctgc

SEQ ID NO: 2127 - DNA, 23 bp, Homo sapiens
  source 1..23: mol_type = other DNA
taccagtgaaccagtgagtctgg

SEQ ID NO: 2128 - DNA, 23 bp, Homo sapiens
  source 1..23: mol_type = other DNA
tgcactaaaaccactgagtccag

SEQ ID NO: 2129 - DNA, 23 bp, Homo sapiens
  source 1..23: mol_type = other DNA
tggggaaataccagtgagtccag

SEQ ID NO: 2130 - DNA, 23 bp, Homo sapiens
  source 1..23: mol_type = other DNA
atgaagaaaaccagtgagacatg

SEQ ID NO: 2131 - DNA, 21 bp, Homo sapiens
  source 1..21: mol_type = other DNA
taaaggaaccaatgagtctgc

SEQ ID NO: 2132 - DNA, 23 bp, Homo sapiens
  source 1..23: mol_type = other DNA
tatagggataccagtaagtggac

SEQ ID NO: 2133 - DNA, 22 bp, Homo sapiens
  source 1..22: mol_type = other DNA
cataaaagaaccaggagtcagg

SEQ ID NO: 2134 - DNA, 23 bp, Homo sapiens
  source 1..23: mol_type = other DNA
tataggaaatccaggggttgggt

SEQ ID NO: 2135 - DNA, 21 bp, Homo sapiens
  source 1..21: mol_type = other DNA
tttataaaccagtgagtctgt

SEQ ID NO: 2136 - DNA, 22 bp, Homo sapiens
  source 1..22: mol_type = other DNA
tatagcaaaaccagtactcaga

SEQ ID NO: 2137 - DNA, 23 bp, Homo sapiens
  source 1..23: mol_type = other DNA
tataggagagccagtgagcaaag

SEQ ID NO: 2138 - DNA, 23 bp, Homo sapiens
  source 1..23: mol_type = other DNA
tgtaggaataccagttagtggtc

SEQ ID NO: 2139 - DNA, 22 bp, Homo sapiens
  source 1..22: mol_type = other DNA
tataagacacaagtgggtccgg

SEQ ID NO: 2140 - DNA, 22 bp, Homo sapiens
  source 1..22: mol_type = other DNA
tatagggaaacctgagatatgg

SEQ ID NO: 2141 - DNA, 22 bp, Homo sapiens
  source 1..22: mol_type = other DNA
tataggaaaaaaaagagtctgg

SEQ ID NO: 2142 - DNA, 23 bp, Homo sapiens
  source 1..23: mol_type = other DNA
aaatacaaaaccggtgagtctgg

SEQ ID NO: 2143 - DNA, 22 bp, Homo sapiens
  source 1..22: mol_type = other DNA
taaaggaagccagtgagtgagc

SEQ ID NO: 2144 - DNA, 23 bp, Homo sapiens
  source 1..23: mol_type = other DNA
tcctgaacaaccaatgagtcagg

SEQ ID NO: 2145 - DNA, 23 bp, Homo sapiens
  source 1..23: mol_type = other DNA
tataggaaggccagtgggcctgg

SEQ ID NO: 2146 - DNA, 23 bp, Homo sapiens
  source 1..23: mol_type = other DNA
aggaggaaaaccagagagtgtga

SEQ ID NO: 2147 - DNA, 24 bp, Homo sapiens
  source 1..24: mol_type = other DNA
cagaggaaaaccaggagagtgtgg

SEQ ID NO: 2148 - DNA, 23 bp, Homo sapiens
  source 1..23: mol_type = other DNA
aaaaaggaaaccagtgagcttgg

SEQ ID NO: 2149 - DNA, 23 bp, Homo sapiens
  source 1..23: mol_type = other DNA
catactattaccagtgagtttgg

SEQ ID NO: 2150 - DNA, 23 bp, Homo sapiens
  source 1..23: mol_type = other DNA
aataaaaaaagcagtgagtgggg

SEQ ID NO: 2151 - DNA, 21 bp, Homo sapiens
  source 1..21: mol_type = other DNA
tgtaggagacagtgagtctga

SEQ ID NO: 2152 - DNA, 22 bp, Homo sapiens
  source 1..22: mol_type = other DNA
tatagacagacaagtgagcagg

SEQ ID NO: 2153 - DNA, 22 bp, Homo sapiens
  source 1..22: mol_type = other DNA
gaaagcaaagccagtggtcagg

SEQ ID NO: 2154 - DNA, 23 bp, Homo sapiens
  source 1..23: mol_type = other DNA
tgtaggacaaccagtggttccag

SEQ ID NO: 2155 - DNA, 23 bp, Homo sapiens
  source 1..23: mol_type = other DNA
tataggaaagctagtgaattttg

SEQ ID NO: 2156 - DNA, 23 bp, Homo sapiens
  source 1..23: mol_type = other DNA
gatgggaaacccactgagtgagg

SEQ ID NO: 2157 - DNA, 24 bp, Homo sapiens
  source 1..24: mol_type = other DNA
tataggaatcaccagtaaatcagg

SEQ ID NO: 2158 - DNA, 22 bp, Homo sapiens
  source 1..22: mol_type = other DNA
tttaggaagacagtgagttagg

SEQ ID NO: 2159 - DNA, 23 bp, Homo sapiens
  source 1..23: mol_type = other DNA
aaaaggaaatccagtgagacaag

SEQ ID NO: 2160 - DNA, 23 bp, Homo sapiens
  source 1..23: mol_type = other DNA
aatatgtaaacgagtgagcatgg

SEQ ID NO: 2161 - DNA, 23 bp, Homo sapiens
  source 1..23: mol_type = other DNA
taaacgtaaactagtgagtctcc

SEQ ID NO: 2162 - DNA, 23 bp, Homo sapiens
  source 1..23: mol_type = other DNA
aataggaaagccagagaattagc

SEQ ID NO: 2163 - DNA, 23 bp, Homo sapiens
  source 1..23: mol_type = other DNA
tatatgaaaaccattggtccagc

SEQ ID NO: 2164 - DNA, 23 bp, Homo sapiens
  source 1..23: mol_type = other DNA
tataggacacctagtaagtaagg

SEQ ID NO: 2165 - DNA, 23 bp, Homo sapiens
  source 1..23: mol_type = other DNA
tattggtaaaccagagagtctca

SEQ ID NO: 2166 - DNA, 22 bp, Homo sapiens
  source 1..22: mol_type = other DNA
tataggaaacaggtgagacatg

SEQ ID NO: 2167 - DNA, 22 bp, Homo sapiens
  source 1..22: mol_type = other DNA
ggtaggaaaacagtaagtgtgg

SEQ ID NO: 2168 - DNA, 22 bp, Homo sapiens
  source 1..22: mol_type = other DNA
tataacaaaaccatgaatgggg

SEQ ID NO: 2169 - DNA, 21 bp, Homo sapiens
  source 1..21: mol_type = other DNA
tatgtgtaaacctgagtcagg

SEQ ID NO: 2170 - DNA, 23 bp, Homo sapiens
  source 1..23: mol_type = other DNA
tataggaaaagcagtgtgtttaa

SEQ ID NO: 2171 - DNA, 23 bp, Homo sapiens
  source 1..23: mol_type = other DNA
aatgagaaaaccagagaggctag

SEQ ID NO: 2172 - DNA, 23 bp, Homo sapiens
  source 1..23: mol_type = other DNA
agtaggaagaccagtgaggaagc

SEQ ID NO: 2173 - DNA, 23 bp, Homo sapiens
  source 1..23: mol_type = other DNA
tataaataaaccagtgaaaaggg

SEQ ID NO: 2174 - DNA, 22 bp, Homo sapiens
  source 1..22: mol_type = other DNA
taagggaaagcagagaggctgg

SEQ ID NO: 2175 - DNA, 23 bp, Homo sapiens
  source 1..23: mol_type = other DNA
tgtaggaaaccaacagagtctga

SEQ ID NO: 2176 - DNA, 23 bp, Homo sapiens
  source 1..23: mol_type = other DNA
tttaggaaaaacagtggtcctag

SEQ ID NO: 2177 - DNA, 23 bp, Homo sapiens
  source 1..23: mol_type = other DNA
tctagtataacaagtgagttggc

SEQ ID NO: 2178 - DNA, 23 bp, Homo sapiens
  source 1..23: mol_type = other DNA
tttaaagaaaacagtgagtttgg

SEQ ID NO: 2179 - DNA, 23 bp, Homo sapiens
  source 1..23: mol_type = other DNA
catagtggaaccagagagtcaga

SEQ ID NO: 2180 - DNA, 23 bp, Homo sapiens
  source 1..23: mol_type = other DNA
tttaggaaaacaatagagtgagt

SEQ ID NO: 2181 - DNA, 23 bp, Homo sapiens
  source 1..23: mol_type = other DNA
catatgaataccagagagtaaga

SEQ ID NO: 2182 - DNA, 23 bp, Homo sapiens
  source 1..23: mol_type = other DNA
gataggaatagcactgaatctgt

SEQ ID NO: 2183 - DNA, 23 bp, Homo sapiens
  source 1..23: mol_type = other DNA
cataggagaactagtgacattgg

SEQ ID NO: 2184 - DNA, 23 bp, Homo sapiens
  source 1..23: mol_type = other DNA
tggaggaaaaacagtgggccggg

SEQ ID NO: 2185 - DNA, 24 bp, Homo sapiens
  source 1..24: mol_type = other DNA
tagagtgaaaaccactgaatcagg

SEQ ID NO: 2186 - DNA, 24 bp, Homo sapiens
  source 1..24: mol_type = other DNA
gataggagaaacctttgagtccag

SEQ ID NO: 2187 - DNA, 24 bp, Homo sapiens
  source 1..24: mol_type = other DNA
taaaggtgaatcagtgaagtcagg

SEQ ID NO: 2188 - DNA, 22 bp, Homo sapiens
  source 1..22: mol_type = other DNA
tagaggaatcctgtgagtcttg

SEQ ID NO: 2189 - DNA, 22 bp, Homo sapiens
  source 1..22: mol_type = other DNA
tgtaggagtcccatgagtctgg

SEQ ID NO: 2190 - DNA, 22 bp, Homo sapiens
  source 1..22: mol_type = other DNA
aataggaaaactaggaggaggg

SEQ ID NO: 2191 - DNA, 21 bp, Homo sapiens
  source 1..21: mol_type = other DNA
tacagtaaccagtgattctgg

SEQ ID NO: 2192 - DNA, 21 bp, Homo sapiens
  source 1..21: mol_type = other DNA
aataggaaaatcaaagtcagg

SEQ ID NO: 2193 - DNA, 23 bp, Homo sapiens
  source 1..23: mol_type = other DNA
tctaggaaaaaaggtgaggtggg

SEQ ID NO: 2194 - DNA, 23 bp, Homo sapiens
  source 1..23: mol_type = other DNA
tatcctataaccagtgaatcctg

SEQ ID NO: 2195 - DNA, 23 bp, Homo sapiens
  source 1..23: mol_type = other DNA
tataggaatacttgtgatttttg

SEQ ID NO: 2196 - DNA, 23 bp, Homo sapiens
  source 1..23: mol_type = other DNA
tatagcgatagcagggagtttgg

SEQ ID NO: 2197 - DNA, 23 bp, Homo sapiens
  source 1..23: mol_type = other DNA
aatatgaaaaccagtgaaccaat

SEQ ID NO: 2198 - DNA, 23 bp, Homo sapiens
  source 1..23: mol_type = other DNA
tgtataaaactcagtgagtctga

SEQ ID NO: 2199 - DNA, 23 bp, Homo sapiens
  source 1..23: mol_type = other DNA
tgtagaaatacatttgagtctgg

SEQ ID NO: 2200 - DNA, 23 bp, Homo sapiens
  source 1..23: mol_type = other DNA
attagaataatcagtgggtctgg

SEQ ID NO: 2201 - DNA, 23 bp, Homo sapiens
  source 1..23: mol_type = other DNA
tataggaaagcctcggtgcctgg

SEQ ID NO: 2202 - DNA, 24 bp, Homo sapiens
  source 1..24: mol_type = other DNA
tttacaaaaacccagtgagacagg

SEQ ID NO: 2203 - DNA, 22 bp, Homo sapiens
  source 1..22: mol_type = other DNA
cagagaaaaccagtgaatcaga

SEQ ID NO: 2204 - DNA, 22 bp, Homo sapiens
  source 1..22: mol_type = other DNA
gatagaaaagcatagagtcagg

SEQ ID NO: 2205 - DNA, 22 bp, Homo sapiens
  source 1..22: mol_type = other DNA
tctaggaaaccagtgaatgagt

SEQ ID NO: 2206 - DNA, 22 bp, Homo sapiens
  source 1..22: mol_type = other DNA
tatagtataaccagtggtatgc

SEQ ID NO: 2207 - DNA, 22 bp, Homo sapiens
  source 1..22: mol_type = other DNA
tgatggaaaaccagtgatctgt

SEQ ID NO: 2208 - DNA, 23 bp, Homo sapiens
  source 1..23: mol_type = other DNA
catagaaagaccagtgtgtcagg

SEQ ID NO: 2209 - DNA, 23 bp, Homo sapiens
  source 1..23: mol_type = other DNA
tataggaatgcttgtgagttttg

SEQ ID NO: 2210 - DNA, 23 bp, Homo sapiens
  source 1..23: mol_type = other DNA
tatagaaaaaccaatgttttggt

SEQ ID NO: 2211 - DNA, 23 bp, Homo sapiens
  source 1..23: mol_type = other DNA
cataggaaaactagacagaatgg

SEQ ID NO: 2212 - DNA, 23 bp, Homo sapiens
  source 1..23: mol_type = other DNA
gaaatttaaaccattgagtcagg

SEQ ID NO: 2213 - DNA, 23 bp, Homo sapiens
  source 1..23: mol_type = other DNA
atctggaaacccagtgagacagg

SEQ ID NO: 2214 - DNA, 23 bp, Homo sapiens
  source 1..23: mol_type = other DNA
tataggataataaatgagtccag

SEQ ID NO: 2215 - DNA, 23 bp, Homo sapiens
  source 1..23: mol_type = other DNA
tctgggaaaagcatggagtaggg

SEQ ID NO: 2216 - DNA, 23 bp, Homo sapiens
  source 1..23: mol_type = other DNA
aagcagaaaaccagtgaggctgt

SEQ ID NO: 2217 - DNA, 23 bp, Homo sapiens
  source 1..23: mol_type = other DNA
tatagggaaagcattcagtcttt

SEQ ID NO: 2218 - DNA, 23 bp, Homo sapiens
  source 1..23: mol_type = other DNA
caaatgaaagccagtgtgacagg

SEQ ID NO: 2219 - DNA, 23 bp, Homo sapiens
  source 1..23: mol_type = other DNA
tggaggaaaaccagagatgtggg

SEQ ID NO: 2220 - DNA, 23 bp, Homo sapiens
  source 1..23: mol_type = other DNA
tacaggaaacacagaaagtctgg

SEQ ID NO: 2221 - DNA, 24 bp, Homo sapiens
  source 1..24: mol_type = other DNA
tattggaacaccaagtgagctggg

SEQ ID NO: 2222 - DNA, 24 bp, Homo sapiens
  source 1..24: mol_type = other DNA
tataaggaaattagtgatgtctgg

SEQ ID NO: 2223 - DNA, 25 bp, Homo sapiens
  source 1..25: mol_type = other DNA
gatagaaaaaccagtagaagtgggg

SEQ ID NO: 2224 - DNA, 22 bp, Homo sapiens
  source 1..22: mol_type = other DNA
tataaaaaagcagtgtatctgg

SEQ ID NO: 2225 - DNA, 22 bp, Homo sapiens
  source 1..22: mol_type = other DNA
aataagaaaaccagtggtgaga

SEQ ID NO: 2226 - DNA, 21 bp, Homo sapiens
  source 1..21: mol_type = other DNA
tatgagaaaaccagtggctgg

SEQ ID NO: 2227 - DNA, 22 bp, Homo sapiens
  source 1..22: mol_type = other DNA
taaagaaaaccagtgacacaag

SEQ ID NO: 2228 - DNA, 22 bp, Homo sapiens
  source 1..22: mol_type = other DNA
tataaaaatctagtgagtctgg

SEQ ID NO: 2229 - DNA, 22 bp, Homo sapiens
  source 1..22: mol_type = other DNA
tataggaaactagtgaatgtag

SEQ ID NO: 2230 - DNA, 22 bp, Homo sapiens
  source 1..22: mol_type = other DNA
aatagaaaatccagagagctgg

SEQ ID NO: 2231 - DNA, 21 bp, Homo sapiens
  source 1..21: mol_type = other DNA
tctgggaaaaccagagtaggg

SEQ ID NO: 2232 - DNA, 21 bp, Homo sapiens
  source 1..21: mol_type = other DNA
tataggtaaaccagagtaggc

SEQ ID NO: 2233 - DNA, 23 bp, Homo sapiens
  source 1..23: mol_type = other DNA
agtaggaaaaccagtatataggg

SEQ ID NO: 2234 - DNA, 23 bp, Homo sapiens
  source 1..23: mol_type = other DNA
aataggtaaaccagagagactgg

SEQ ID NO: 2235 - DNA, 23 bp, Homo sapiens
  source 1..23: mol_type = other DNA
cataggtaaaccagtgatcacag

SEQ ID NO: 2236 - DNA, 22 bp, Homo sapiens
  source 1..22: mol_type = other DNA
agtaggaaaactatgagtctgg

SEQ ID NO: 2237 - DNA, 22 bp, Homo sapiens
  source 1..22: mol_type = other DNA
catataaaaccagtgagtgggt

SEQ ID NO: 2238 - DNA, 23 bp, Homo sapiens
  source 1..23: mol_type = other DNA
tataggtaaactagtgactaggg

SEQ ID NO: 2239 - DNA, 22 bp, Homo sapiens
  source 1..22: mol_type = other DNA
agtagcaaaaccaggagccagg

SEQ ID NO: 2240 - DNA, 22 bp, Homo sapiens
  source 1..22: mol_type = other DNA
cctaggaaaccagtgagtcaaa

SEQ ID NO: 2241 - DNA, 23 bp, Homo sapiens
  source 1..23: mol_type = other DNA
ggtataaaaaccagtgagtaggg

SEQ ID NO: 2242 - DNA, 23 bp, Homo sapiens
  source 1..23: mol_type = other DNA
tatagcataaccaggagttctgg

SEQ ID NO: 2243 - DNA, 23 bp, Homo sapiens
  source 1..23: mol_type = other DNA
attaagaaaaccagtgattcaga

SEQ ID NO: 2244 - DNA, 22 bp, Homo sapiens
  source 1..22: mol_type = other DNA
caaaggaaaccagtgagttgga

SEQ ID NO: 2245 - DNA, 23 bp, Homo sapiens
  source 1..23: mol_type = other DNA
gattaggaaaccagggaatccgg

SEQ ID NO: 2246 - DNA, 21 bp, Homo sapiens
  source 1..21: mol_type = other DNA
cataggaaaacataagtctgg

SEQ ID NO: 2247 - DNA, 23 bp, Homo sapiens
  source 1..23: mol_type = other DNA
aagaggaaaaccagttagaaggc

SEQ ID NO: 2248 - DNA, 23 bp, Homo sapiens
  source 1..23: mol_type = other DNA
tataggtaaacctgtgacggggg

SEQ ID NO: 2249 - DNA, 23 bp, Homo sapiens
  source 1..23: mol_type = other DNA
aataagaagactagtgagtgggg

SEQ ID NO: 2250 - DNA, 23 bp, Homo sapiens
  source 1..23: mol_type = other DNA
ttaagaaaaaccagagagttggg

SEQ ID NO: 2251 - DNA, 22 bp, Homo sapiens
  source 1..22: mol_type = other DNA
catagtgaatccagtggtctgg

SEQ ID NO: 2252 - DNA, 23 bp, Homo sapiens
  source 1..23: mol_type = other DNA
aataagaaaatcagttagtgggt

SEQ ID NO: 2253 - DNA, 21 bp, Homo sapiens
  source 1..21: mol_type = other DNA
tatatgaacaccagtgacagg

SEQ ID NO: 2254 - DNA, 22 bp, Homo sapiens
  source 1..22: mol_type = other DNA
tgtagggaaaccaggacccagg

SEQ ID NO: 2255 - DNA, 23 bp, Homo sapiens
  source 1..23: mol_type = other DNA
ttgactaaaaccagtgagccggc

SEQ ID NO: 2256 - DNA, 23 bp, Homo sapiens
  source 1..23: mol_type = other DNA
tatataataaccagtgagatgga

SEQ ID NO: 2257 - DNA, 23 bp, Homo sapiens
  source 1..23: mol_type = other DNA
aataggaaatccagtgactccag

SEQ ID NO: 2258 - DNA, 23 bp, Homo sapiens
  source 1..23: mol_type = other DNA
aaaaagaaaatcagtgagtggga

SEQ ID NO: 2259 - DNA, 23 bp, Homo sapiens
  source 1..23: mol_type = other DNA
cctaggaaaaccaatgagaggag

SEQ ID NO: 2260 - DNA, 21 bp, Homo sapiens
  source 1..21: mol_type = other DNA
tataggactcagtgagtgggg

SEQ ID NO: 2261 - DNA, 22 bp, Homo sapiens
  source 1..22: mol_type = other DNA
tataagaaaaccaggactatgg

SEQ ID NO: 2262 - DNA, 23 bp, Homo sapiens
  source 1..23: mol_type = other DNA
cctgcaaaaaccagtgagtgggg

SEQ ID NO: 2263 - DNA, 22 bp, Homo sapiens
  source 1..22: mol_type = other DNA
agttggaaaaccactggtctgg

SEQ ID NO: 2264 - DNA, 24 bp, Homo sapiens
  source 1..24: mol_type = other DNA
tatagaggagacaagtgagtctgg

SEQ ID NO: 2265 - DNA, 23 bp, Homo sapiens
  source 1..23: mol_type = other DNA
aatacaaaaaccagtgagtgaag

SEQ ID NO: 2266 - DNA, 23 bp, Homo sapiens
  source 1..23: mol_type = other DNA
tcaaagaaaaccattgattcagg

SEQ ID NO: 2267 - DNA, 24 bp, Homo sapiens
  source 1..24: mol_type = other DNA
tgtaagaaaactagatgagtcagg

SEQ ID NO: 2268 - DNA, 22 bp, Homo sapiens
  source 1..22: mol_type = other DNA
tttatgtaaaccagtgatatgg

SEQ ID NO: 2269 - DNA, 23 bp, Homo sapiens
  source 1..23: mol_type = other DNA
aataggtaaacaagtgagcatgg

SEQ ID NO: 2270 - DNA, 22 bp, Homo sapiens
  source 1..22: mol_type = other DNA
tatacagcaaccagtagtcagg

SEQ ID NO: 2271 - DNA, 22 bp, Homo sapiens
  source 1..22: mol_type = other DNA
aacagggataccaggagtcagg

SEQ ID NO: 2272 - DNA, 24 bp, Homo sapiens
  source 1..24: mol_type = other DNA
gagagataaaactagtgagtctgg

SEQ ID NO: 2273 - DNA, 22 bp, Homo sapiens
  source 1..22: mol_type = other DNA
tacaaaaaatcagtgagtcagg

SEQ ID NO: 2274 - DNA, 21 bp, Homo sapiens
  source 1..21: mol_type = other DNA
taaaagaaaaccagtgtcatg

SEQ ID NO: 2275 - DNA, 22 bp, Homo sapiens
  source 1..22: mol_type = other DNA
aatattaaaaccatgagtaggg

SEQ ID NO: 2276 - DNA, 23 bp, Homo sapiens
  source 1..23: mol_type = other DNA
tataagaaagccagtggtatggg

SEQ ID NO: 2277 - DNA, 22 bp, Homo sapiens
  source 1..22: mol_type = other DNA
ggtagaaaaccagtgaatctga

SEQ ID NO: 2278 - DNA, 23 bp, Homo sapiens
  source 1..23: mol_type = other DNA
ttcagggagaccagtgagtggga

SEQ ID NO: 2279 - DNA, 23 bp, Homo sapiens
  source 1..23: mol_type = other DNA
gatcacaaaaccagtgagtggga

SEQ ID NO: 2280 - DNA, 23 bp, Homo sapiens
  source 1..23: mol_type = other DNA
attagcaaaaccagggagtcagg

SEQ ID NO: 2281 - DNA, 24 bp, Homo sapiens
  source 1..24: mol_type = other DNA
tagagttcaaaccagtgagtcggc

SEQ ID NO: 2282 - DNA, 22 bp, Homo sapiens
  source 1..22: mol_type = other DNA
tgtttgaaaaccatgagtccag

SEQ ID NO: 2283 - DNA, 23 bp, Homo sapiens
  source 1..23: mol_type = other DNA
agaagaaaaaccagtgatactgg

SEQ ID NO: 2284 - DNA, 23 bp, Homo sapiens
  source 1..23: mol_type = other DNA
tgtaaggaaactagtgaggctgg

SEQ ID NO: 2285 - DNA, 24 bp, Homo sapiens
  source 1..24: mol_type = other DNA
cataagaaaacttagtgagtgggg

SEQ ID NO: 2286 - DNA, 24 bp, Homo sapiens
  source 1..24: mol_type = other DNA
catagttaaaaccatagagtctgg

SEQ ID NO: 2287 - DNA, 23 bp, Homo sapiens
  source 1..23: mol_type = other DNA
aatgagaaaaccagtgaatgtgg

SEQ ID NO: 2288 - DNA, 23 bp, Homo sapiens
  source 1..23: mol_type = other DNA
tgtctgtaaaccagtgaggtagg

SEQ ID NO: 2289 - DNA, 22 bp, Homo sapiens
  source 1..22: mol_type = other DNA
tattggaaacaagtaagtctgg

SEQ ID NO: 2290 - DNA, 21 bp, Homo sapiens
  source 1..21: mol_type = other DNA
aataggaaaaccagagtagag

SEQ ID NO: 2291 - DNA, 23 bp, Homo sapiens
  source 1..23: mol_type = other DNA
tgtaggaaaaacagtgaaggtag

SEQ ID NO: 2292 - DNA, 23 bp, Homo sapiens
  source 1..23: mol_type = other DNA
aataggaaaaccagtcaggtgtg

SEQ ID NO: 2293 - DNA, 22 bp, Homo sapiens
  source 1..22: mol_type = other DNA
aataagaaaaccattgtgctgg

SEQ ID NO: 2294 - DNA, 22 bp, Homo sapiens
  source 1..22: mol_type = other DNA
gagatgaaaaccagtgttccgg

SEQ ID NO: 2295 - DNA, 25 bp, Homo sapiens
  source 1..25: mol_type = other DNA
tatagaaagtaaccagtaagtagga

SEQ ID NO: 2296 - DNA, 23 bp, Homo sapiens
  source 1..23: mol_type = other DNA
tggggggaagccagtgagccagg

SEQ ID NO: 2297 - DNA, 22 bp, Homo sapiens
  source 1..22: mol_type = other DNA
tacaggaaaccagtgggtaaag

SEQ ID NO: 2298 - DNA, 23 bp, Homo sapiens
  source 1..23: mol_type = other DNA
aaagggaaagccagtgagtcaga

SEQ ID NO: 2299 - DNA, 22 bp, Homo sapiens
  source 1..22: mol_type = other DNA
tgcaggagaccagggagtcagg

SEQ ID NO: 2300 - DNA, 22 bp, Homo sapiens
  source 1..22: mol_type = other DNA
gaaatgaaaacagtgagtctga

SEQ ID NO: 2301 - DNA, 23 bp, Homo sapiens
  source 1..23: mol_type = other DNA
ggtaggaaggccaatgagtcagg

SEQ ID NO: 2302 - DNA, 22 bp, Homo sapiens
  source 1..22: mol_type = other DNA
taaagcaaaaccatgagtcaga

SEQ ID NO: 2303 - DNA, 22 bp, Homo sapiens
  source 1..22: mol_type = other DNA
tatgggaaaatcaatgatcagg

SEQ ID NO: 2304 - DNA, 23 bp, Homo sapiens
  source 1..23: mol_type = other DNA
tgcagggaagccagtgagccggg

SEQ ID NO: 2305 - DNA, 22 bp, Homo sapiens
  source 1..22: mol_type = other DNA
gaaaggaaaatcagtgacctgg

SEQ ID NO: 2306 - DNA, 23 bp, Homo sapiens
  source 1..23: mol_type = other DNA
tatagggatgccagtgattcata

SEQ ID NO: 2307 - DNA, 22 bp, Homo sapiens
  source 1..22: mol_type = other DNA
cctaaaagaccagtgagtctgg

SEQ ID NO: 2308 - DNA, 23 bp, Homo sapiens
  source 1..23: mol_type = other DNA
tatgagaaaaccagtgaattagt

SEQ ID NO: 2309 - DNA, 23 bp, Homo sapiens
  source 1..23: mol_type = other DNA
aaaagttaaaccagtgagtccaa

SEQ ID NO: 2310 - DNA, 23 bp, Homo sapiens
  source 1..23: mol_type = other DNA
attaggaaaaccagtgaacttga

SEQ ID NO: 2311 - DNA, 24 bp, Homo sapiens
  source 1..24: mol_type = other DNA
tctagcaaaaccaggtgagtagga

SEQ ID NO: 2312 - DNA, 22 bp, Homo sapiens
  source 1..22: mol_type = other DNA
tatagtaacccagagagtatgg

SEQ ID NO: 2313 - DNA, 23 bp, Homo sapiens
  source 1..23: mol_type = other DNA
aaagggaaaacaagtaagtcaga

SEQ ID NO: 2314 - DNA, 23 bp, Homo sapiens
  source 1..23: mol_type = other DNA
tataagaaacccagagagcttgt

SEQ ID NO: 2315 - DNA, 24 bp, Homo sapiens
  source 1..24: mol_type = other DNA
gataggaaaaccaggtgagataag

SEQ ID NO: 2316 - DNA, 24 bp, Homo sapiens
  source 1..24: mol_type = other DNA
tataggtatagccagtgtgtcagg

SEQ ID NO: 2317 - DNA, 22 bp, Homo sapiens
  source 1..22: mol_type = other DNA
gaaaagaaaaccaggagccagg

SEQ ID NO: 2318 - DNA, 21 bp, Homo sapiens
  source 1..21: mol_type = other DNA
catagaaagcagtgagtcaga

SEQ ID NO: 2319 - DNA, 23 bp, Homo sapiens
  source 1..23: mol_type = other DNA
tttagataaatcagtgagtctga

SEQ ID NO: 2320 - DNA, 21 bp, Homo sapiens
  source 1..21: mol_type = other DNA
tgtaaaaaacagtgagtgtgg

SEQ ID NO: 2321 - DNA, 21 bp, Homo sapiens
  source 1..21: mol_type = other DNA
tatagtaaaaactgagtctgg

SEQ ID NO: 2322 - DNA, 22 bp, Homo sapiens
  source 1..22: mol_type = other DNA
tataggaagaacagtggtgagg

SEQ ID NO: 2323 - DNA, 23 bp, Homo sapiens
  source 1..23: mol_type = other DNA
tggaggaaaacaagggagagtgg

SEQ ID NO: 2324 - DNA, 23 bp, Homo sapiens
  source 1..23: mol_type = other DNA
tagaagaaaaccactgtgacctg

SEQ ID NO: 2325 - DNA, 23 bp, Homo sapiens
  source 1..23: mol_type = other DNA
tacaggaaaagcagggagtaacg

SEQ ID NO: 2326 - DNA, 23 bp, Homo sapiens
  source 1..23: mol_type = other DNA
tttgttaaaaccagtgagttttg

SEQ ID NO: 2327 - DNA, 23 bp, Homo sapiens
  source 1..23: mol_type = other DNA
tataaggacaccagtcagattgg

SEQ ID NO: 2328 - DNA, 23 bp, Homo sapiens
  source 1..23: mol_type = other DNA
tatagtaggaaaagtgagcctgg

SEQ ID NO: 2329 - DNA, 23 bp, Homo sapiens
  source 1..23: mol_type = other DNA
tatatggaaaaacgtgagacagg

SEQ ID NO: 2330 - DNA, 23 bp, Homo sapiens
  source 1..23: mol_type = other DNA
gataggaaaacctcttagggtgg

SEQ ID NO: 2331 - DNA, 23 bp, Homo sapiens
  source 1..23: mol_type = other DNA
tagaggaaaagcattcagtcttt

SEQ ID NO: 2332 - DNA, 23 bp, Homo sapiens
  source 1..23: mol_type = other DNA
tgtaacaaaaccagtgtgttagc

SEQ ID NO: 2333 - DNA, 23 bp, Homo sapiens
  source 1..23: mol_type = other DNA
taaaggaaaaccagtggttgtca

SEQ ID NO: 2334 - DNA, 23 bp, Homo sapiens
  source 1..23: mol_type = other DNA
tataggaaaacaactgatatttg

SEQ ID NO: 2335 - DNA, 23 bp, Homo sapiens
  source 1..23: mol_type = other DNA
tattggaaaacctgtgagtctca

SEQ ID NO: 2336 - DNA, 23 bp, Homo sapiens
  source 1..23: mol_type = other DNA
aatacgaaaaccagtcaggggtg

SEQ ID NO: 2337 - DNA, 23 bp, Homo sapiens
  source 1..23: mol_type = other DNA
tctatgaaaaccaaagagtcttt

SEQ ID NO: 2338 - DNA, 23 bp, Homo sapiens
  source 1..23: mol_type = other DNA
tatagtgaaatcaggcagtaagg

SEQ ID NO: 2339 - DNA, 23 bp, Homo sapiens
  source 1..23: mol_type = other DNA
aatagcataactagtgactctga

SEQ ID NO: 2340 - DNA, 23 bp, Homo sapiens
  source 1..23: mol_type = other DNA
tttttcaaaagcagtgagtcaag

SEQ ID NO: 2341 - DNA, 23 bp, Homo sapiens
  source 1..23: mol_type = other DNA
tgtaggaggagcagagaatctgg

SEQ ID NO: 2342 - DNA, 25 bp, Homo sapiens
  source 1..25: mol_type = other DNA
agtaggaaaaccatagtgagcaagg

SEQ ID NO: 2343 - DNA, 22 bp, Homo sapiens
  source 1..22: mol_type = other DNA
tagagaaaaccagtgactgaag

SEQ ID NO: 2344 - DNA, 22 bp, Homo sapiens
  source 1..22: mol_type = other DNA
tatagtaacaccatgagtaagt

SEQ ID NO: 2345 - DNA, 22 bp, Homo sapiens
  source 1..22: mol_type = other DNA
taatggaaaaccaggagtagga

SEQ ID NO: 2346 - DNA, 21 bp, Homo sapiens
  source 1..21: mol_type = other DNA
catagcaaaaagtgagtctag

SEQ ID NO: 2347 - DNA, 21 bp, Homo sapiens
  source 1..21: mol_type = other DNA
aacaggaaaaccagagtttgg

SEQ ID NO: 2348 - DNA, 22 bp, Homo sapiens
  source 1..22: mol_type = other DNA
tacaggaaaccagtgagtgctg

SEQ ID NO: 2349 - DNA, 22 bp, Homo sapiens
  source 1..22: mol_type = other DNA
tgtaggagaccagtgagcaggg

SEQ ID NO: 2350 - DNA, 23 bp, Homo sapiens
  source 1..23: mol_type = other DNA
tataagaataccagtgatactgg

SEQ ID NO: 2351 - DNA, 23 bp, Homo sapiens
  source 1..23: mol_type = other DNA
aatagcaaaaccagggagttggc

SEQ ID NO: 2352 - DNA, 24 bp, Homo sapiens
  source 1..24: mol_type = other DNA
aatagataaaaccagtgagttggg

SEQ ID NO: 2353 - DNA, 22 bp, Homo sapiens
  source 1..22: mol_type = other DNA
gttaggtataccagtgatctgg

SEQ ID NO: 2354 - DNA, 22 bp, Homo sapiens
  source 1..22: mol_type = other DNA
gataggaaaccagagagtatgg

SEQ ID NO: 2355 - DNA, 22 bp, Homo sapiens
  source 1..22: mol_type = other DNA
gagaggaaaaccaggagccagg

SEQ ID NO: 2356 - DNA, 22 bp, Homo sapiens
  source 1..22: mol_type = other DNA
aataagaaaccagtgagtaaga

SEQ ID NO: 2357 - DNA, 23 bp, Homo sapiens
  source 1..23: mol_type = other DNA
gataggaataccagtgaggtcag

SEQ ID NO: 2358 - DNA, 23 bp, Homo sapiens
  source 1..23: mol_type = other DNA
aataggaaaactagtgacagggc

SEQ ID NO: 2359 - DNA, 22 bp, Homo sapiens
  source 1..22: mol_type = other DNA
tttagaaaaccaatgagtaggt

SEQ ID NO: 2360 - DNA, 23 bp, Homo sapiens
  source 1..23: mol_type = other DNA
tataggaaaacaagtaagagagg

SEQ ID NO: 2361 - DNA, 22 bp, Homo sapiens
  source 1..22: mol_type = other DNA
tgtaggaatactagtagtcagg

SEQ ID NO: 2362 - DNA, 23 bp, Homo sapiens
  source 1..23: mol_type = other DNA
cagaggtaaaccagtaagtggga

SEQ ID NO: 2363 - DNA, 23 bp, Homo sapiens
  source 1..23: mol_type = other DNA
aattaggaaaccagtgagccaga

SEQ ID NO: 2364 - DNA, 22 bp, Homo sapiens
  source 1..22: mol_type = other DNA
attagggaaaccagtgagcaga

SEQ ID NO: 2365 - DNA, 22 bp, Homo sapiens
  source 1..22: mol_type = other DNA
gagaggaaaaccaggattccgg

SEQ ID NO: 2366 - DNA, 23 bp, Homo sapiens
  source 1..23: mol_type = other DNA
gagaggaaaacctgtgagctggt

SEQ ID NO: 2367 - DNA, 23 bp, Homo sapiens
  source 1..23: mol_type = other DNA
tataggaacaccagagatccagg

SEQ ID NO: 2368 - DNA, 23 bp, Homo sapiens
  source 1..23: mol_type = other DNA
actaagaaaaccaatgagtaaga

SEQ ID NO: 2369 - DNA, 22 bp, Homo sapiens
  source 1..22: mol_type = other DNA
catagaagaccagaaagtcagg

SEQ ID NO: 2370 - DNA, 22 bp, Homo sapiens
  source 1..22: mol_type = other DNA
tacaggaaaccatagagtcagg

SEQ ID NO: 2371 - DNA, 22 bp, Homo sapiens
  source 1..22: mol_type = other DNA
agtaggaaaaccaggagtgtgg

SEQ ID NO: 2372 - DNA, 22 bp, Homo sapiens
  source 1..22: mol_type = other DNA
tctaggaaaacagtgagtccag

SEQ ID NO: 2373 - DNA, 23 bp, Homo sapiens
  source 1..23: mol_type = other DNA
tataggaaacacagtgaagacag

SEQ ID NO: 2374 - DNA, 22 bp, Homo sapiens
  source 1..22: mol_type = other DNA
agtaagaaaatcaggagtcagg

SEQ ID NO: 2375 - DNA, 23 bp, Homo sapiens
  source 1..23: mol_type = other DNA
aatagtgaaaccaatgagtaaga

SEQ ID NO: 2376 - DNA, 22 bp, Homo sapiens
  source 1..22: mol_type = other DNA
tataggttcacagtaagtcagg

SEQ ID NO: 2377 - DNA, 23 bp, Homo sapiens
  source 1..23: mol_type = other DNA
agaaggaaaactagtaagtctgg

SEQ ID NO: 2378 - DNA, 23 bp, Homo sapiens
  source 1..23: mol_type = other DNA
aactataaaaccagtgagtcagt

SEQ ID NO: 2379 - DNA, 23 bp, Homo sapiens
  source 1..23: mol_type = other DNA
gtaaggaacaccagtgagtctgg

SEQ ID NO: 2380 - DNA, 22 bp, Homo sapiens
  source 1..22: mol_type = other DNA
ggcaggaaaaccaggaatcagg

SEQ ID NO: 2381 - DNA, 23 bp, Homo sapiens
  source 1..23: mol_type = other DNA
tgcaggaaaacctgtgatttggt

SEQ ID NO: 2382 - DNA, 23 bp, Homo sapiens
  source 1..23: mol_type = other DNA
tgtaggaaaaacagtaagaaggc

SEQ ID NO: 2383 - DNA, 23 bp, Homo sapiens
  source 1..23: mol_type = other DNA
agtatataaacaagtgagtctgg

SEQ ID NO: 2384 - DNA, 21 bp, Homo sapiens
  source 1..21: mol_type = other DNA
tgtagtaaaaagtgagtctgg

SEQ ID NO: 2385 - DNA, 23 bp, Homo sapiens
  source 1..23: mol_type = other DNA
tagggggaaaccagtgagccagg

SEQ ID NO: 2386 - DNA, 23 bp, Homo sapiens
  source 1..23: mol_type = other DNA
catcagtaaaccagtgagtgggc

SEQ ID NO: 2387 - DNA, 23 bp, Homo sapiens
  source 1..23: mol_type = other DNA
tacaggaaagccagtgggtctgg

SEQ ID NO: 2388 - DNA, 21 bp, Homo sapiens
  source 1..21: mol_type = other DNA
tgtaggaaagagtgagtctgg

SEQ ID NO: 2389 - DNA, 22 bp, Homo sapiens
  source 1..22: mol_type = other DNA
gataggagaaccaggaaacagg

SEQ ID NO: 2390 - DNA, 22 bp, Homo sapiens
  source 1..22: mol_type = other DNA
aataggaaaaccataaagctgg

SEQ ID NO: 2391 - DNA, 23 bp, Homo sapiens
  source 1..23: mol_type = other DNA
ttatggaaaaccactgagtctag

SEQ ID NO: 2392 - DNA, 22 bp, Homo sapiens
  source 1..22: mol_type = other DNA
tttaggaaaacagtgaatttgg

SEQ ID NO: 2393 - DNA, 22 bp, Homo sapiens
  source 1..22: mol_type = other DNA
gatagtcaaaccgtgaatcagg

SEQ ID NO: 2394 - DNA, 21 bp, Homo sapiens
  source 1..21: mol_type = other DNA
tataggttacagtgagttagg

SEQ ID NO: 2395 - DNA, 24 bp, Homo sapiens
  source 1..24: mol_type = other DNA
tataggaagacccagggagtctgg

SEQ ID NO: 2396 - DNA, 23 bp, Homo sapiens
  source 1..23: mol_type = other DNA
taaatgaaaaccagtgaggggaa

SEQ ID NO: 2397 - DNA, 23 bp, Homo sapiens
  source 1..23: mol_type = other DNA
tgtaggtaaccctttgagtcagg

SEQ ID NO: 2398 - DNA, 21 bp, Homo sapiens
  source 1..21: mol_type = other DNA
tttaagaaccactgagtcagg

SEQ ID NO: 2399 - DNA, 22 bp, Homo sapiens
  source 1..22: mol_type = other DNA
aatggaaataccaggagtcagg

SEQ ID NO: 2400 - DNA, 23 bp, Homo sapiens
  source 1..23: mol_type = other DNA
tatagaagaaccagggagatagg

SEQ ID NO: 2401 - DNA, 22 bp, Homo sapiens
  source 1..22: mol_type = other DNA
cataggaatctagtgattctgg

SEQ ID NO: 2402 - DNA, 23 bp, Homo sapiens
  source 1..23: mol_type = other DNA
tgtaggaaaaccaggatttctgg

SEQ ID NO: 2403 - DNA, 23 bp, Homo sapiens
  source 1..23: mol_type = other DNA
tgaaataaaacctgtgagtcagg

SEQ ID NO: 2404 - DNA, 21 bp, Homo sapiens
  source 1..21: mol_type = other DNA
tataggaatcagtgagtgtgc

SEQ ID NO: 2405 - DNA, 21 bp, Homo sapiens
  source 1..21: mol_type = other DNA
tataagtaaacctgtgtcggg

SEQ ID NO: 2406 - DNA, 23 bp, Homo sapiens
  source 1..23: mol_type = other DNA
gaaaggaaagccagtgagaggga

SEQ ID NO: 2407 - DNA, 22 bp, Homo sapiens
  source 1..22: mol_type = other DNA
tacagaaagccagtgagtaggg

SEQ ID NO: 2408 - DNA, 23 bp, Homo sapiens
  source 1..23: mol_type = other DNA
tttaaggacaccagtgagtctgg

SEQ ID NO: 2409 - DNA, 22 bp, Homo sapiens
  source 1..22: mol_type = other DNA
tggaggaagccagtgagtcgag

SEQ ID NO: 2410 - DNA, 23 bp, Homo sapiens
  source 1..23: mol_type = other DNA
tattgcaaaaccactgagttggt

SEQ ID NO: 2411 - DNA, 21 bp, Homo sapiens
  source 1..21: mol_type = other DNA
taaaggaaccaatgagtccag

SEQ ID NO: 2412 - DNA, 22 bp, Homo sapiens
  source 1..22: mol_type = other DNA
aatatgaaaaccagaagtccag

SEQ ID NO: 2413 - DNA, 23 bp, Homo sapiens
  source 1..23: mol_type = other DNA
tgtaggaaccccagtgagattgg

SEQ ID NO: 2414 - DNA, 23 bp, Homo sapiens
  source 1..23: mol_type = other DNA
tgtagaaaaaccaatgagtttag

SEQ ID NO: 2415 - DNA, 23 bp, Homo sapiens
  source 1..23: mol_type = other DNA
tataagaaaaccagtttaacagg

SEQ ID NO: 2416 - DNA, 23 bp, Homo sapiens
  source 1..23: mol_type = other DNA
gataagaaaaccagttaccaggg

SEQ ID NO: 2417 - DNA, 23 bp, Homo sapiens
  source 1..23: mol_type = other DNA
tataagaagaccagaatgtcagg

SEQ ID NO: 2418 - DNA, 22 bp, Homo sapiens
  source 1..22: mol_type = other DNA
tatattagaaccatgaatctgg

SEQ ID NO: 2419 - DNA, 23 bp, Homo sapiens
  source 1..23: mol_type = other DNA
tattagaaaaccagtcaggtcag

SEQ ID NO: 2420 - DNA, 22 bp, Homo sapiens
  source 1..22: mol_type = other DNA
aataggaataccagttgacagg

SEQ ID NO: 2421 - DNA, 22 bp, Homo sapiens
  source 1..22: mol_type = other DNA
tgcagcagaaccagtgatctgg

SEQ ID NO: 2422 - DNA, 23 bp, Homo sapiens
  source 1..23: mol_type = other DNA
tgaaggaagaccagagagtcaag

SEQ ID NO: 2423 - DNA, 22 bp, Homo sapiens
  source 1..22: mol_type = other DNA
aaaagaaaaactagtgagcagg

SEQ ID NO: 2424 - DNA, 23 bp, Homo sapiens
  source 1..23: mol_type = other DNA
gggaagaaaagcagtgagtcggt

SEQ ID NO: 2425 - DNA, 22 bp, Homo sapiens
  source 1..22: mol_type = other DNA
gatgtaagaccagggagtctgg

SEQ ID NO: 2426 - DNA, 23 bp, Homo sapiens
  source 1..23: mol_type = other DNA
tataggaaaaacagtgtatacaa

SEQ ID NO: 2427 - DNA, 23 bp, Homo sapiens
  source 1..23: mol_type = other DNA
tatcggaaaaccactgagctgga

SEQ ID NO: 2428 - DNA, 23 bp, Homo sapiens
  source 1..23: mol_type = other DNA
tagggggaaaccagaaagtcagg

SEQ ID NO: 2429 - DNA, 21 bp, Homo sapiens
  source 1..21: mol_type = other DNA
tctagaaaccaatgagtcaag

SEQ ID NO: 2430 - DNA, 23 bp, Homo sapiens
  source 1..23: mol_type = other DNA
gctatggaaaccagtgaatctag

SEQ ID NO: 2431 - DNA, 23 bp, Homo sapiens
  source 1..23: mol_type = other DNA
tttaggtaaaacagtgagtaagt

SEQ ID NO: 2432 - DNA, 24 bp, Homo sapiens
  source 1..24: mol_type = other DNA
tgtaaggaaaacagtagagtcagg

SEQ ID NO: 2433 - DNA, 23 bp, Homo sapiens
  source 1..23: mol_type = other DNA
aatagaaagaccattgagccggg

SEQ ID NO: 2434 - DNA, 22 bp, Homo sapiens
  source 1..22: mol_type = other DNA
gatggaaaaaccactgatcagg

SEQ ID NO: 2435 - DNA, 21 bp, Homo sapiens
  source 1..21: mol_type = other DNA
tatcggaaccagagagtcagg

SEQ ID NO: 2436 - DNA, 21 bp, Homo sapiens
  source 1..21: mol_type = other DNA
tgcaggacacagtgagtcagg

SEQ ID NO: 2437 - DNA, 22 bp, Homo sapiens
  source 1..22: mol_type = other DNA
tgtaggaaaacggtgagtctca

SEQ ID NO: 2438 - DNA, 22 bp, Homo sapiens
  source 1..22: mol_type = other DNA
tataggaaaacgatgagtaaaa

SEQ ID NO: 2439 - DNA, 22 bp, Homo sapiens
  source 1..22: mol_type = other DNA
aagagcaaaaccaggagtcaag

SEQ ID NO: 2440 - DNA, 23 bp, Homo sapiens
  source 1..23: mol_type = other DNA
ttgtgaaaaaccagagagtccag

SEQ ID NO: 2441 - DNA, 24 bp, Homo sapiens
  source 1..24: mol_type = other DNA
tatgggaaaaccaagagtgtcaag

SEQ ID NO: 2442 - DNA, 22 bp, Homo sapiens
  source 1..22: mol_type = other DNA
gataggaaaaccatgattcaga

SEQ ID NO: 2443 - DNA, 23 bp, Homo sapiens
  source 1..23: mol_type = other DNA
gatgggaagaacagtgagtgaga

SEQ ID NO: 2444 - DNA, 23 bp, Homo sapiens
  source 1..23: mol_type = other DNA
tgaggggaagccagtgagccagg

SEQ ID NO: 2445 - DNA, 23 bp, Homo sapiens
  source 1..23: mol_type = other DNA
tataggtgttccaatgagtaggg

SEQ ID NO: 2446 - DNA, 24 bp, Homo sapiens
  source 1..24: mol_type = other DNA
aagaagaaaaccagtgaagtctag

SEQ ID NO: 2447 - DNA, 22 bp, Homo sapiens
  source 1..22: mol_type = other DNA
taaagtaaaacagtgagtaagg

SEQ ID NO: 2448 - DNA, 22 bp, Homo sapiens
  source 1..22: mol_type = other DNA
tttaggagaaccaggaatgtgg

SEQ ID NO: 2449 - DNA, 23 bp, Homo sapiens
  source 1..23: mol_type = other DNA
tataagaaaaccatgaagtgaag

SEQ ID NO: 2450 - DNA, 22 bp, Homo sapiens
  source 1..22: mol_type = other DNA
aataggaaaactgtgagtagcg

SEQ ID NO: 2451 - DNA, 23 bp, Homo sapiens
  source 1..23: mol_type = other DNA
ttaagtataaccagtgaagctgg

SEQ ID NO: 2452 - DNA, 23 bp, Homo sapiens
  source 1..23: mol_type = other DNA
tgtaggaacccgagggagtctgc

SEQ ID NO: 2453 - DNA, 23 bp, Homo sapiens
  source 1..23: mol_type = other DNA
tatagaaaatgcagtgattaggg

SEQ ID NO: 2454 - DNA, 23 bp, Homo sapiens
  source 1..23: mol_type = other DNA
tagaggaaaacaagagggacatg

SEQ ID NO: 2455 - DNA, 23 bp, Homo sapiens
  source 1..23: mol_type = other DNA
cattggtaaaccagtgactgagc

SEQ ID NO: 2456 - DNA, 23 bp, Homo sapiens
  source 1..23: mol_type = other DNA
gataggaaaagcattgaatttgt

SEQ ID NO: 2457 - DNA, 23 bp, Homo sapiens
  source 1..23: mol_type = other DNA
atcaggaaaaccagttaatcaag

SEQ ID NO: 2458 - DNA, 23 bp, Homo sapiens
  source 1..23: mol_type = other DNA
aataagaaaaccatttagtcaga

SEQ ID NO: 2459 - DNA, 23 bp, Homo sapiens
  source 1..23: mol_type = other DNA
aaaaggaaaagcagggagccttg

SEQ ID NO: 2460 - DNA, 24 bp, Homo sapiens
  source 1..24: mol_type = other DNA
agaaggaaaaccaatgatgtctgg

SEQ ID NO: 2461 - DNA, 22 bp, Homo sapiens
  source 1..22: mol_type = other DNA
tatagaaaaccagagagagcag

SEQ ID NO: 2462 - DNA, 22 bp, Homo sapiens
  source 1..22: mol_type = other DNA
tataggcaaaccataaattagg

SEQ ID NO: 2463 - DNA, 22 bp, Homo sapiens
  source 1..22: mol_type = other DNA
aataggaaaaccaatagaaagg

SEQ ID NO: 2464 - DNA, 22 bp, Homo sapiens
  source 1..22: mol_type = other DNA
cataggaaaagtagagatctgg

SEQ ID NO: 2465 - DNA, 23 bp, Homo sapiens
  source 1..23: mol_type = other DNA
cttagaaaacccagtgaggccgg

SEQ ID NO: 2466 - DNA, 23 bp, Homo sapiens
  source 1..23: mol_type = other DNA
tataggtaaactagtgtcttggg

SEQ ID NO: 2467 - DNA, 23 bp, Homo sapiens
  source 1..23: mol_type = other DNA
cattgaaaaacgagtgagtcact

SEQ ID NO: 2468 - DNA, 23 bp, Homo sapiens
  source 1..23: mol_type = other DNA
cttcagaaaatcagtgagtttgg

SEQ ID NO: 2469 - DNA, 23 bp, Homo sapiens
  source 1..23: mol_type = other DNA
tctaggaaaaccagcaaatgggg

SEQ ID NO: 2470 - DNA, 23 bp, Homo sapiens
  source 1..23: mol_type = other DNA
aatagcaaaacctgagattcagc

SEQ ID NO: 2471 - DNA, 23 bp, Homo sapiens
  source 1..23: mol_type = other DNA
agtacgaaaaccagtcaggcgtg

SEQ ID NO: 2472 - DNA, 23 bp, Homo sapiens
  source 1..23: mol_type = other DNA
tataggaaacccactgtgtgcct

SEQ ID NO: 2473 - DNA, 23 bp, Homo sapiens
  source 1..23: mol_type = other DNA
tataagtaaaccaccaagtcttg

SEQ ID NO: 2474 - DNA, 23 bp, Homo sapiens
  source 1..23: mol_type = other DNA
tgtaggaaaaccaagaagtagag

SEQ ID NO: 2475 - DNA, 23 bp, Homo sapiens
  source 1..23: mol_type = other DNA
aattggcaacccaggaagtctgg

SEQ ID NO: 2476 - DNA, 23 bp, Homo sapiens
  source 1..23: mol_type = other DNA
catgagcaagccagtgaggctgg

SEQ ID NO: 2477 - DNA, 25 bp, Homo sapiens
  source 1..25: mol_type = other DNA
tatagggaaaagccagtgagaagga

SEQ ID NO: 2478 - DNA, 22 bp, Homo sapiens
  source 1..22: mol_type = other DNA
tatagaaaaacagaaagtttgg

SEQ ID NO: 2479 - DNA, 22 bp, Homo sapiens
  source 1..22: mol_type = other DNA
cagaggaaaaccaggtggccgg

SEQ ID NO: 2480 - DNA, 21 bp, Homo sapiens
  source 1..21: mol_type = other DNA
tgtaagaagcagtgagtccgg

SEQ ID NO: 2481 - DNA, 21 bp, Homo sapiens
  source 1..21: mol_type = other DNA
tctaaaaacctgtaagtctgg

SEQ ID NO: 2482 - DNA, 23 bp, Homo sapiens
  source 1..23: mol_type = other DNA
tataggaagcattttgagtctgg

SEQ ID NO: 2483 - DNA, 23 bp, Homo sapiens
  source 1..23: mol_type = other DNA
tatagaaacagaagtgaatcagt

SEQ ID NO: 2484 - DNA, 24 bp, Homo sapiens
  source 1..24: mol_type = other DNA
tataagaataccagtgaagtcaat

SEQ ID NO: 2485 - DNA, 25 bp, Homo sapiens
  source 1..25: mol_type = other DNA
tacaggagtaagccactgcgtcagg

SEQ ID NO: 2486 - DNA, 22 bp, Homo sapiens
  source 1..22: mol_type = other DNA
tcaatgaaaacagtgaatcagg

SEQ ID NO: 2487 - DNA, 22 bp, Homo sapiens
  source 1..22: mol_type = other DNA
tgagggaaaatcgtgagtctgg

SEQ ID NO: 2488 - DNA, 22 bp, Homo sapiens
  source 1..22: mol_type = other DNA
gatgggaaaaccaagactcagg

SEQ ID NO: 2489 - DNA, 22 bp, Homo sapiens
  source 1..22: mol_type = other DNA
tttaggaaaatcatgatttagg

SEQ ID NO: 2490 - DNA, 22 bp, Homo sapiens
  source 1..22: mol_type = other DNA
gatagcaaaaccatggctcagg

SEQ ID NO: 2491 - DNA, 22 bp, Homo sapiens
  source 1..22: mol_type = other DNA
tataagaacaccagtgatggga

SEQ ID NO: 2492 - DNA, 21 bp, Homo sapiens
  source 1..21: mol_type = other DNA
tataggaacacatgagtttgg

SEQ ID NO: 2493 - DNA, 21 bp, Homo sapiens
  source 1..21: mol_type = other DNA
taaaggaatacctgagactgg

SEQ ID NO: 2494 - DNA, 21 bp, Homo sapiens
  source 1..21: mol_type = other DNA
aataggaaaaccattttcagg

SEQ ID NO: 2495 - DNA, 23 bp, Homo sapiens
  source 1..23: mol_type = other DNA
aataggaaaaccagtaaaatagg

SEQ ID NO: 2496 - DNA, 23 bp, Homo sapiens
  source 1..23: mol_type = other DNA
gatagagaaactagtgagtgggg

SEQ ID NO: 2497 - DNA, 23 bp, Homo sapiens
  source 1..23: mol_type = other DNA
tagaggaaaaccagtcagtctag

SEQ ID NO: 2498 - DNA, 23 bp, Homo sapiens
  source 1..23: mol_type = other DNA
tatagaaaaaccactatgtcagg

SEQ ID NO: 2499 - DNA, 21 bp, Homo sapiens
  source 1..21: mol_type = other DNA
tataggaaaaagtgaatcagg

SEQ ID NO: 2500 - DNA, 22 bp, Homo sapiens
  source 1..22: mol_type = other DNA
tgcaggcaaaccagtggtcagg

SEQ ID NO: 2501 - DNA, 23 bp, Homo sapiens
  source 1..23: mol_type = other DNA
aggaataaaaccagtgagtgggg

SEQ ID NO: 2502 - DNA, 23 bp, Homo sapiens
  source 1..23: mol_type = other DNA
tctaggaaaaccagtggtaatgg

SEQ ID NO: 2503 - DNA, 22 bp, Homo sapiens
  source 1..22: mol_type = other DNA
tatagaaaaacaatgagtagga

SEQ ID NO: 2504 - DNA, 21 bp, Homo sapiens
  source 1..21: mol_type = other DNA
tgcaggaaccaatgagtcagg

SEQ ID NO: 2505 - DNA, 22 bp, Homo sapiens
  source 1..22: mol_type = other DNA
tatagaaatccagtgaggccag

SEQ ID NO: 2506 - DNA, 23 bp, Homo sapiens
  source 1..23: mol_type = other DNA
agcagtaaaaccattgagtcagg

SEQ ID NO: 2507 - DNA, 23 bp, Homo sapiens
  source 1..23: mol_type = other DNA
catagggaatccagtgaagtggg

SEQ ID NO: 2508 - DNA, 23 bp, Homo sapiens
  source 1..23: mol_type = other DNA
tctaggataaccagtgatttctg

SEQ ID NO: 2509 - DNA, 23 bp, Homo sapiens
  source 1..23: mol_type = other DNA
catagtagaatcagtgagtcagg

SEQ ID NO: 2510 - DNA, 23 bp, Homo sapiens
  source 1..23: mol_type = other DNA
ggagtggaaaccagtgagtcagg

SEQ ID NO: 2511 - DNA, 23 bp, Homo sapiens
  source 1..23: mol_type = other DNA
tgaggagaaaccagtgagccagg

SEQ ID NO: 2512 - DNA, 23 bp, Homo sapiens
  source 1..23: mol_type = other DNA
tgtaggaaaaccagtgaagagca

SEQ ID NO: 2513 - DNA, 23 bp, Homo sapiens
  source 1..23: mol_type = other DNA
tataggtgaatcagtgagtgagt

SEQ ID NO: 2514 - DNA, 24 bp, Homo sapiens
  source 1..24: mol_type = other DNA
tatgtggaaaaccagtgaggtgag

SEQ ID NO: 2515 - DNA, 23 bp, Homo sapiens
  source 1..23: mol_type = other DNA
tatatgaaaatcagagaatctgg

SEQ ID NO: 2516 - DNA, 23 bp, Homo sapiens
  source 1..23: mol_type = other DNA
cataggaacaccagtgacatggg

SEQ ID NO: 2517 - DNA, 23 bp, Homo sapiens
  source 1..23: mol_type = other DNA
taggggataaccagtgaattgga

SEQ ID NO: 2518 - DNA, 22 bp, Homo sapiens
  source 1..22: mol_type = other DNA
aatagaatgaccagtagtcagg

SEQ ID NO: 2519 - DNA, 23 bp, Homo sapiens
  source 1..23: mol_type = other DNA
tgagggaaaaccagtgtgtgggt

SEQ ID NO: 2520 - DNA, 21 bp, Homo sapiens
  source 1..21: mol_type = other DNA
tatatcaaccagtgagtatgg

SEQ ID NO: 2521 - DNA, 22 bp, Homo sapiens
  source 1..22: mol_type = other DNA
tcaaagaaaaccaggagtgtgg

SEQ ID NO: 2522 - DNA, 23 bp, Homo sapiens
  source 1..23: mol_type = other DNA
agttggagaaccagtgactctgg

SEQ ID NO: 2523 - DNA, 22 bp, Homo sapiens
  source 1..22: mol_type = other DNA
tatagtgtaaccattgagcagg

SEQ ID NO: 2524 - DNA, 23 bp, Homo sapiens
  source 1..23: mol_type = other DNA
tatgggaaaaccagtggcaaggg

SEQ ID NO: 2525 - DNA, 23 bp, Homo sapiens
  source 1..23: mol_type = other DNA
aacaggaaaaccagagactggga

SEQ ID NO: 2526 - DNA, 22 bp, Homo sapiens
  source 1..22: mol_type = other DNA
tataagaaaactaggaatcaga

SEQ ID NO: 2527 - DNA, 23 bp, Homo sapiens
  source 1..23: mol_type = other DNA
tagaggaaaacctgtgagtactg

SEQ ID NO: 2528 - DNA, 22 bp, Homo sapiens
  source 1..22: mol_type = other DNA
gacaagaaaaccagggatcagg

SEQ ID NO: 2529 - DNA, 23 bp, Homo sapiens
  source 1..23: mol_type = other DNA
aatagggagaccagtgagcttgg

SEQ ID NO: 2530 - DNA, 23 bp, Homo sapiens
  source 1..23: mol_type = other DNA
aatagagaacacagtgagtcaga

SEQ ID NO: 2531 - DNA, 23 bp, Homo sapiens
  source 1..23: mol_type = other DNA
aataggaaaacaactgagctggt

SEQ ID NO: 2532 - DNA, 23 bp, Homo sapiens
  source 1..23: mol_type = other DNA
tataagaatgctagtgattttgg

SEQ ID NO: 2533 - DNA, 22 bp, Homo sapiens
  source 1..22: mol_type = other DNA
aataggaaaccagtgaatcaat

SEQ ID NO: 2534 - DNA, 22 bp, Homo sapiens
  source 1..22: mol_type = other DNA
gataggaaaaccaaaagtgtgg

SEQ ID NO: 2535 - DNA, 23 bp, Homo sapiens
  source 1..23: mol_type = other DNA
taagggaaacccagtgattcagg

SEQ ID NO: 2536 - DNA, 22 bp, Homo sapiens
  source 1..22: mol_type = other DNA
tctaggaagccagagagtcagg

SEQ ID NO: 2537 - DNA, 22 bp, Homo sapiens
  source 1..22: mol_type = other DNA
gagaggaaaacagagagtctgg

SEQ ID NO: 2538 - DNA, 23 bp, Homo sapiens
  source 1..23: mol_type = other DNA
tataacaataccagagagtgggt

SEQ ID NO: 2539 - DNA, 21 bp, Homo sapiens
  source 1..21: mol_type = other DNA
tatagtagccagagagtctgg

SEQ ID NO: 2540 - DNA, 23 bp, Homo sapiens
  source 1..23: mol_type = other DNA
tatagcaaatccagcgatctggg

SEQ ID NO: 2541 - DNA, 21 bp, Homo sapiens
  source 1..21: mol_type = other DNA
tataggaaagccagagtcaga

SEQ ID NO: 2542 - DNA, 22 bp, Homo sapiens
  source 1..22: mol_type = other DNA
aataagaaaatcaggactctgg

SEQ ID NO: 2543 - DNA, 24 bp, Homo sapiens
  source 1..24: mol_type = other DNA
aataggataaaccagaaagtaagg

SEQ ID NO: 2544 - DNA, 22 bp, Homo sapiens
  source 1..22: mol_type = other DNA
tatagggaaacagaaagtaggg

SEQ ID NO: 2545 - DNA, 23 bp, Homo sapiens
  source 1..23: mol_type = other DNA
tatatgcaaaccagaaagtagga

SEQ ID NO: 2546 - DNA, 23 bp, Homo sapiens
  source 1..23: mol_type = other DNA
tataagaaaaccagagaacctag

SEQ ID NO: 2547 - DNA, 22 bp, Homo sapiens
  source 1..22: mol_type = other DNA
tataggaatacagggtgtctgg

SEQ ID NO: 2548 - DNA, 22 bp, Homo sapiens
  source 1..22: mol_type = other DNA
tagggggaagccagtgatctgg

SEQ ID NO: 2549 - DNA, 23 bp, Homo sapiens
  source 1..23: mol_type = other DNA
tgggggaaagccagtgagccggg

SEQ ID NO: 2550 - DNA, 23 bp, Homo sapiens
  source 1..23: mol_type = other DNA
ggcagggataccagtgagtctgt

SEQ ID NO: 2551 - DNA, 23 bp, Homo sapiens
  source 1..23: mol_type = other DNA
aatgtgttaaccagtgagtgagg

SEQ ID NO: 2552 - DNA, 22 bp, Homo sapiens
  source 1..22: mol_type = other DNA
tctaggaagacagtgagttggt

SEQ ID NO: 2553 - DNA, 22 bp, Homo sapiens
  source 1..22: mol_type = other DNA
tacataaaaaccagtgatgggg

SEQ ID NO: 2554 - DNA, 23 bp, Homo sapiens
  source 1..23: mol_type = other DNA
ggtaggataacaagtgagttgtg

SEQ ID NO: 2555 - DNA, 23 bp, Homo sapiens
  source 1..23: mol_type = other DNA
tacacacaaaccagggagtcggg

SEQ ID NO: 2556 - DNA, 22 bp, Homo sapiens
  source 1..22: mol_type = other DNA
tgtaggcagccagtgagtcatg

SEQ ID NO: 2557 - DNA, 22 bp, Homo sapiens
  source 1..22: mol_type = other DNA
tacaggaaaacagtgagtgagt

SEQ ID NO: 2558 - DNA, 22 bp, Homo sapiens
  source 1..22: mol_type = other DNA
taaaggtaaaccaatagtcagg

SEQ ID NO: 2559 - DNA, 23 bp, Homo sapiens
  source 1..23: mol_type = other DNA
tacctggaaaacagtgagcctgg

SEQ ID NO: 2560 - DNA, 23 bp, Homo sapiens
  source 1..23: mol_type = other DNA
agtactacaaccagtgagccagg

SEQ ID NO: 2561 - DNA, 23 bp, Homo sapiens
  source 1..23: mol_type = other DNA
cttaggaaaatcagtgagatagc

SEQ ID NO: 2562 - DNA, 24 bp, Homo sapiens
  source 1..24: mol_type = other DNA
tatcctgaaaccagtggagtctgg

SEQ ID NO: 2563 - DNA, 22 bp, Homo sapiens
  source 1..22: mol_type = other DNA
tttaagaaaacctgtggtctgg

SEQ ID NO: 2564 - DNA, 23 bp, Homo sapiens
  source 1..23: mol_type = other DNA
aatagcaaaaccaggaaatcagg

SEQ ID NO: 2565 - DNA, 23 bp, Homo sapiens
  source 1..23: mol_type = other DNA
tatagacaacacagtgagactcg

SEQ ID NO: 2566 - DNA, 23 bp, Homo sapiens
  source 1..23: mol_type = other DNA
tgtagaaaaaccagtaaggaaag

SEQ ID NO: 2567 - DNA, 23 bp, Homo sapiens
  source 1..23: mol_type = other DNA
tatatttaaagcagtaagtctgg

SEQ ID NO: 2568 - DNA, 22 bp, Homo sapiens
  source 1..22: mol_type = other DNA
tttaggaaaaccctgaatcagt

SEQ ID NO: 2569 - DNA, 22 bp, Homo sapiens
  source 1..22: mol_type = other DNA
tctaggaaacccgtgagtgagg

SEQ ID NO: 2570 - DNA, 22 bp, Homo sapiens
  source 1..22: mol_type = other DNA
tttacgaaaaccatgagtctga

SEQ ID NO: 2571 - DNA, 23 bp, Homo sapiens
  source 1..23: mol_type = other DNA
tgtagaaaaagcagtgagcaaga

SEQ ID NO: 2572 - DNA, 23 bp, Homo sapiens
  source 1..23: mol_type = other DNA
tataggaacaccagtcagatcag

SEQ ID NO: 2573 - DNA, 23 bp, Homo sapiens
  source 1..23: mol_type = other DNA
gcctggaaaaccagtgagacaga

SEQ ID NO: 2574 - DNA, 23 bp, Homo sapiens
  source 1..23: mol_type = other DNA
tacaggaaaggcagtgggtgggg

SEQ ID NO: 2575 - DNA, 23 bp, Homo sapiens
  source 1..23: mol_type = other DNA
tataggaaagcaagtgatttttg

SEQ ID NO: 2576 - DNA, 23 bp, Homo sapiens
  source 1..23: mol_type = other DNA
tttaagaaaaacagtgaggctgg

SEQ ID NO: 2577 - DNA, 22 bp, Homo sapiens
  source 1..22: mol_type = other DNA
aataggaaaaccagtgctatga

SEQ ID NO: 2578 - DNA, 21 bp, Homo sapiens
  source 1..21: mol_type = other DNA
tataggaaaaaatgagttagg

SEQ ID NO: 2579 - DNA, 21 bp, Homo sapiens
  source 1..21: mol_type = other DNA
ggtaggaaaaccattgtccgg

SEQ ID NO: 2580 - DNA, 23 bp, Homo sapiens
  source 1..23: mol_type = other DNA
tagtgtaaaacaagtgagtccag

SEQ ID NO: 2581 - DNA, 23 bp, Homo sapiens
  source 1..23: mol_type = other DNA
gatgggaaaaggagccagtctgg

SEQ ID NO: 2582 - DNA, 23 bp, Homo sapiens
  source 1..23: mol_type = other DNA
tataaggatactagtgatactgg

SEQ ID NO: 2583 - DNA, 23 bp, Homo sapiens
  source 1..23: mol_type = other DNA
tatgggaaaccgaatgaggatgg

SEQ ID NO: 2584 - DNA, 23 bp, Homo sapiens
  source 1..23: mol_type = other DNA
attaggaaaaccaggttctctgg

SEQ ID NO: 2585 - DNA, 23 bp, Homo sapiens
  source 1..23: mol_type = other DNA
tataagggaaacagggagtcagg

SEQ ID NO: 2586 - DNA, 23 bp, Homo sapiens
  source 1..23: mol_type = other DNA
tgcaggaaaacaagcgatttggg

SEQ ID NO: 2587 - DNA, 23 bp, Homo sapiens
  source 1..23: mol_type = other DNA
tataagaataacagttatactgg

SEQ ID NO: 2588 - DNA, 24 bp, Homo sapiens
  source 1..24: mol_type = other DNA
tataggagaccacagtgagaaggg

SEQ ID NO: 2589 - DNA, 22 bp, Homo sapiens
  source 1..22: mol_type = other DNA
tatagtagacaagtgagtctgt

SEQ ID NO: 2590 - DNA, 22 bp, Homo sapiens
  source 1..22: mol_type = other DNA
tttaggaaaaccagtagaaagc

SEQ ID NO: 2591 - DNA, 23 bp, Homo sapiens
  source 1..23: mol_type = other DNA
tgtatgatcaccagcgagtcatg

SEQ ID NO: 2592 - DNA, 23 bp, Homo sapiens
  source 1..23: mol_type = other DNA
tttagggaaacccatttgtctgg

SEQ ID NO: 2593 - DNA, 23 bp, Homo sapiens
  source 1..23: mol_type = other DNA
aataggaagaccagtgtgtgaaa

SEQ ID NO: 2594 - DNA, 23 bp, Homo sapiens
  source 1..23: mol_type = other DNA
cataggaaaatcagagtgctggg

SEQ ID NO: 2595 - DNA, 23 bp, Homo sapiens
  source 1..23: mol_type = other DNA
aatacgaaaaccagtcagacatg

SEQ ID NO: 2596 - DNA, 23 bp, Homo sapiens
  source 1..23: mol_type = other DNA
aattgaaaaaccagtggacctgg

SEQ ID NO: 2597 - DNA, 23 bp, Homo sapiens
  source 1..23: mol_type = other DNA
aaaaggaaaaccagtgtatcaaa

SEQ ID NO: 2598 - DNA, 25 bp, Homo sapiens
  source 1..25: mol_type = other DNA
tataggcatgaaccactgtatctgg

SEQ ID NO: 2599 - DNA, 25 bp, Homo sapiens
  source 1..25: mol_type = other DNA
tatatgaaaaccagagctatttggg

SEQ ID NO: 2600 - DNA, 21 bp, Homo sapiens
  source 1..21: mol_type = other DNA
tatagtaaaccatgagtctgg

SEQ ID NO: 2601 - DNA, 22 bp, Homo sapiens
  source 1..22: mol_type = other DNA
cataggaatccagtgagatggg

SEQ ID NO: 2602 - DNA, 23 bp, Homo sapiens
  source 1..23: mol_type = other DNA
tgtaagaataccagtgagcaggc

SEQ ID NO: 2603 - DNA, 23 bp, Homo sapiens
  source 1..23: mol_type = other DNA
aacaggaaagccagtgagcaggc

SEQ ID NO: 2604 - DNA, 22 bp, Homo sapiens
  source 1..22: mol_type = other DNA
gataggaataccagtattctgg

SEQ ID NO: 2605 - DNA, 22 bp, Homo sapiens
  source 1..22: mol_type = other DNA
tgtagtaaacaagtgagtctga

SEQ ID NO: 2606 - DNA, 22 bp, Homo sapiens
  source 1..22: mol_type = other DNA
aataggaaaccaatgaatccag

SEQ ID NO: 2607 - DNA, 23 bp, Homo sapiens
  source 1..23: mol_type = other DNA
aatgaggaaaccagtgagtgtgg

SEQ ID NO: 2608 - DNA, 22 bp, Homo sapiens
  source 1..22: mol_type = other DNA
tgtagaaaaaccatgagtcatg

SEQ ID NO: 2609 - DNA, 23 bp, Homo sapiens
  source 1..23: mol_type = other DNA
tataggaaaacagtgaagtttgg

SEQ ID NO: 2610 - DNA, 23 bp, Homo sapiens
  source 1..23: mol_type = other DNA
aataggaagaccagtgaactcag

SEQ ID NO: 2611 - DNA, 22 bp, Homo sapiens
  source 1..22: mol_type = other DNA
tataagaaaccagagaggctgg

SEQ ID NO: 2612 - DNA, 23 bp, Homo sapiens
  source 1..23: mol_type = other DNA
accaggaaaaccagtgatcatgg

SEQ ID NO: 2613 - DNA, 22 bp, Homo sapiens
  source 1..22: mol_type = other DNA
tataggtaaaccaggagtgcgg

SEQ ID NO: 2614 - DNA, 22 bp, Homo sapiens
  source 1..22: mol_type = other DNA
tatatggtacccatgagtctgg

SEQ ID NO: 2615 - DNA, 23 bp, Homo sapiens
  source 1..23: mol_type = other DNA
tctaggaaaaccaggagtgcagg

SEQ ID NO: 2616 - DNA, 23 bp, Homo sapiens
  source 1..23: mol_type = other DNA
agtaggaaaatcagtgaggaggc

SEQ ID NO: 2617 - DNA, 23 bp, Homo sapiens
  source 1..23: mol_type = other DNA
gataggaaaatcagggagtaggg

SEQ ID NO: 2618 - DNA, 22 bp, Homo sapiens
  source 1..22: mol_type = other DNA
cataggtaaaccagaagtctag

SEQ ID NO: 2619 - DNA, 24 bp, Homo sapiens
  source 1..24: mol_type = other DNA
tatgtaaagaaccagtgagtcatg

SEQ ID NO: 2620 - DNA, 22 bp, Homo sapiens
  source 1..22: mol_type = other DNA
tataggaaaccactgagggctg

SEQ ID NO: 2621 - DNA, 22 bp, Homo sapiens
  source 1..22: mol_type = other DNA
tagaggaaaatcagaagtctgg

SEQ ID NO: 2622 - DNA, 21 bp, Homo sapiens
  source 1..21: mol_type = other DNA
catagaaaccagtgagtcaaa

SEQ ID NO: 2623 - DNA, 23 bp, Homo sapiens
  source 1..23: mol_type = other DNA
aataggagaaccagagaaccagg

SEQ ID NO: 2624 - DNA, 23 bp, Homo sapiens
  source 1..23: mol_type = other DNA
agcagtaaaaccagtgaggtggg

SEQ ID NO: 2625 - DNA, 21 bp, Homo sapiens
  source 1..21: mol_type = other DNA
tataggtagaccagtgaaagg

SEQ ID NO: 2626 - DNA, 23 bp, Homo sapiens
  source 1..23: mol_type = other DNA
gatgaggaaaccagtgagtgctg

SEQ ID NO: 2627 - DNA, 22 bp, Homo sapiens
  source 1..22: mol_type = other DNA
aataagaaactagtgagtttgg

SEQ ID NO: 2628 - DNA, 22 bp, Homo sapiens
  source 1..22: mol_type = other DNA
agtaggaaaagcaggggtctgg

SEQ ID NO: 2629 - DNA, 22 bp, Homo sapiens
  source 1..22: mol_type = other DNA
gatagaaaaccagagtgtcggg

SEQ ID NO: 2630 - DNA, 21 bp, Homo sapiens
  source 1..21: mol_type = other DNA
tgtagtgaaaccagtgtccgg

SEQ ID NO: 2631 - DNA, 22 bp, Homo sapiens
  source 1..22: mol_type = other DNA
tgtgggaaaaccataagtctgg

SEQ ID NO: 2632 - DNA, 23 bp, Homo sapiens
  source 1..23: mol_type = other DNA
cctgggaaagccagtgagtagga

SEQ ID NO: 2633 - DNA, 23 bp, Homo sapiens
  source 1..23: mol_type = other DNA
tttgaggaaaccagtgagatggg

SEQ ID NO: 2634 - DNA, 22 bp, Homo sapiens
  source 1..22: mol_type = other DNA
tataggaaatacagtggtcaga

SEQ ID NO: 2635 - DNA, 23 bp, Homo sapiens
  source 1..23: mol_type = other DNA
tgtagaaaaactaatgactcggg

SEQ ID NO: 2636 - DNA, 22 bp, Homo sapiens
  source 1..22: mol_type = other DNA
tgtaggaaatccaagagcccgg

SEQ ID NO: 2637 - DNA, 24 bp, Homo sapiens
  source 1..24: mol_type = other DNA
tgaaggaaaaccagatgagtcaga

SEQ ID NO: 2638 - DNA, 23 bp, Homo sapiens
  source 1..23: mol_type = other DNA
tgaaggaaaaccagtgaataatg

SEQ ID NO: 2639 - DNA, 23 bp, Homo sapiens
  source 1..23: mol_type = other DNA
actgtgaaaaccactgagtcaga

SEQ ID NO: 2640 - DNA, 24 bp, Homo sapiens
  source 1..24: mol_type = other DNA
tgtagaaataatcagtgagtcagg

SEQ ID NO: 2641 - DNA, 22 bp, Homo sapiens
  source 1..22: mol_type = other DNA
tatagaaaaccaatgactagga

SEQ ID NO: 2642 - DNA, 22 bp, Homo sapiens
  source 1..22: mol_type = other DNA
tatggaaaaccagtttgtggga

SEQ ID NO: 2643 - DNA, 22 bp, Homo sapiens
  source 1..22: mol_type = other DNA
tatatacaaaccaggagtaggg

SEQ ID NO: 2644 - DNA, 22 bp, Homo sapiens
  source 1..22: mol_type = other DNA
catagtaaagccaggactctgg

SEQ ID NO: 2645 - DNA, 22 bp, Homo sapiens
  source 1..22: mol_type = other DNA
tataagaaaccaatgagggtgg

SEQ ID NO: 2646 - DNA, 23 bp, Homo sapiens
  source 1..23: mol_type = other DNA
aaagagaaaaccagtgagtgaga

SEQ ID NO: 2647 - DNA, 22 bp, Homo sapiens
  source 1..22: mol_type = other DNA
taaggagaaccagagagtaggc

SEQ ID NO: 2648 - DNA, 22 bp, Homo sapiens
  source 1..22: mol_type = other DNA
attaggaaatccatgattcagg

SEQ ID NO: 2649 - DNA, 23 bp, Homo sapiens
  source 1..23: mol_type = other DNA
tgtaagaagaacagtgagtcaga

SEQ ID NO: 2650 - DNA, 22 bp, Homo sapiens
  source 1..22: mol_type = other DNA
tttaggaaaccagtaattcctg

SEQ ID NO: 2651 - DNA, 21 bp, Homo sapiens
  source 1..21: mol_type = other DNA
tataggaaccaatgaatcaga

SEQ ID NO: 2652 - DNA, 23 bp, Homo sapiens
  source 1..23: mol_type = other DNA
taggcaagaaccactgagtccgg

SEQ ID NO: 2653 - DNA, 22 bp, Homo sapiens
  source 1..22: mol_type = other DNA
gacaggaaaacagtgagtgtgg

SEQ ID NO: 2654 - DNA, 22 bp, Homo sapiens
  source 1..22: mol_type = other DNA
tattctagaaccagtagtcagg

SEQ ID NO: 2655 - DNA, 23 bp, Homo sapiens
  source 1..23: mol_type = other DNA
tacaggaaaaacagtgaggtcat

SEQ ID NO: 2656 - DNA, 24 bp, Homo sapiens
  source 1..24: mol_type = other DNA
tggagaataaaccagtgagtcaga

SEQ ID NO: 2657 - DNA, 23 bp, Homo sapiens
  source 1..23: mol_type = other DNA
gacaggaaaaccagttagaaggt

SEQ ID NO: 2658 - DNA, 23 bp, Homo sapiens
  source 1..23: mol_type = other DNA
tagggaaaaaccagtgaatgagg

SEQ ID NO: 2659 - DNA, 24 bp, Homo sapiens
  source 1..24: mol_type = other DNA
catagaagaaaccagaaagtctgg

SEQ ID NO: 2660 - DNA, 22 bp, Homo sapiens
  source 1..22: mol_type = other DNA
catatgaagccagtgagttggg

SEQ ID NO: 2661 - DNA, 24 bp, Homo sapiens
  source 1..24: mol_type = other DNA
cagaggaaaaaccagtgagcctga

SEQ ID NO: 2662 - DNA, 22 bp, Homo sapiens
  source 1..22: mol_type = other DNA
gttaggaaaactatgagtttgg

SEQ ID NO: 2663 - DNA, 22 bp, Homo sapiens
  source 1..22: mol_type = other DNA
aagaggagaaccatgtgtctgg

SEQ ID NO: 2664 - DNA, 23 bp, Homo sapiens
  source 1..23: mol_type = other DNA
aagaatagaaacagtgagtcagg

SEQ ID NO: 2665 - DNA, 23 bp, Homo sapiens
  source 1..23: mol_type = other DNA
aggaataaaatcagtgagtctgg

SEQ ID NO: 2666 - DNA, 21 bp, Homo sapiens
  source 1..21: mol_type = other DNA
ggtagaacccagtgagtcagg

SEQ ID NO: 2667 - DNA, 21 bp, Homo sapiens
  source 1..21: mol_type = other DNA
tataggaaacagtgagaaatg

SEQ ID NO: 2668 - DNA, 23 bp, Homo sapiens
  source 1..23: mol_type = other DNA
tataagtaaaccagttactggag

SEQ ID NO: 2669 - DNA, 24 bp, Homo sapiens
  source 1..24: mol_type = other DNA
tgtaggatctccaagtgagtcagg

SEQ ID NO: 2670 - DNA, 23 bp, Homo sapiens
  source 1..23: mol_type = other DNA
gaaactcaaaccagagagtcggg

SEQ ID NO: 2671 - DNA, 23 bp, Homo sapiens
  source 1..23: mol_type = other DNA
tacacaaaaaccagagagcctgg

SEQ ID NO: 2672 - DNA, 23 bp, Homo sapiens
  source 1..23: mol_type = other DNA
taccgtataaccagtgagtctgg

SEQ ID NO: 2673 - DNA, 23 bp, Homo sapiens
  source 1..23: mol_type = other DNA
ttcagggacaccagtgagttgtg

SEQ ID NO: 2674 - DNA, 23 bp, Homo sapiens
  source 1..23: mol_type = other DNA
gtaagaagaaccagggagtcagg

SEQ ID NO: 2675 - DNA, 23 bp, Homo sapiens
  source 1..23: mol_type = other DNA
tgttgaattaccagtgagttagg

SEQ ID NO: 2676 - DNA, 22 bp, Homo sapiens
  source 1..22: mol_type = other DNA
tgttgaaaaccagtgggttagg

SEQ ID NO: 2677 - DNA, 23 bp, Homo sapiens
  source 1..23: mol_type = other DNA
tagaggaagacaggggagtctgt

SEQ ID NO: 2678 - DNA, 23 bp, Homo sapiens
  source 1..23: mol_type = other DNA
tctaagcaaaccagtaagtgagg

SEQ ID NO: 2679 - DNA, 23 bp, Homo sapiens
  source 1..23: mol_type = other DNA
tataggaaagctagtgattttta

SEQ ID NO: 2680 - DNA, 23 bp, Homo sapiens
  source 1..23: mol_type = other DNA
aatagaaagaccaatgagactgt

SEQ ID NO: 2681 - DNA, 23 bp, Homo sapiens
  source 1..23: mol_type = other DNA
tgcagacaagccagtgagttggg

SEQ ID NO: 2682 - DNA, 23 bp, Homo sapiens
  source 1..23: mol_type = other DNA
tttaggtaaaccagagtttctgg

SEQ ID NO: 2683 - DNA, 22 bp, Homo sapiens
  source 1..22: mol_type = other DNA
tataagaatccagtgagacggc

SEQ ID NO: 2684 - DNA, 23 bp, Homo sapiens
  source 1..23: mol_type = other DNA
tataggaaagcctctgagacagg

SEQ ID NO: 2685 - DNA, 23 bp, Homo sapiens
  source 1..23: mol_type = other DNA
agtaggaaaaccaggggacctgg

SEQ ID NO: 2686 - DNA, 23 bp, Homo sapiens
  source 1..23: mol_type = other DNA
tacaggaggaccagagagccatg

SEQ ID NO: 2687 - DNA, 23 bp, Homo sapiens
  source 1..23: mol_type = other DNA
ctaagccaagccagtgagtcagg

SEQ ID NO: 2688 - DNA, 22 bp, Homo sapiens
  source 1..22: mol_type = other DNA
tataggcaaaccaatggtccca

SEQ ID NO: 2689 - DNA, 22 bp, Homo sapiens
  source 1..22: mol_type = other DNA
tataagaaaaccaatgttcaga

SEQ ID NO: 2690 - DNA, 22 bp, Homo sapiens
  source 1..22: mol_type = other DNA
aatagaaaaactagtggtctga

SEQ ID NO: 2691 - DNA, 23 bp, Homo sapiens
  source 1..23: mol_type = other DNA
tataggaaaaccaatgagtgacc

SEQ ID NO: 2692 - DNA, 23 bp, Homo sapiens
  source 1..23: mol_type = other DNA
ttatggaaacccagtaagtgggg

SEQ ID NO: 2693 - DNA, 23 bp, Homo sapiens
  source 1..23: mol_type = other DNA
atttggaaaagaagtgagtttgg

SEQ ID NO: 2694 - DNA, 23 bp, Homo sapiens
  source 1..23: mol_type = other DNA
taaagtaaatctaatgagtcaga

SEQ ID NO: 2695 - DNA, 23 bp, Homo sapiens
  source 1..23: mol_type = other DNA
tataggaaatccagtaaattaat

SEQ ID NO: 2696 - DNA, 23 bp, Homo sapiens
  source 1..23: mol_type = other DNA
taaaggaaaacattttagtctga

SEQ ID NO: 2697 - DNA, 23 bp, Homo sapiens
  source 1..23: mol_type = other DNA
tataggatggacaatgagtttgg

SEQ ID NO: 2698 - DNA, 22 bp, Homo sapiens
  source 1..22: mol_type = other DNA
tatagataaaccagtgctctga

SEQ ID NO: 2699 - DNA, 21 bp, Homo sapiens
  source 1..21: mol_type = other DNA
tataggaaaactagtatctga

SEQ ID NO: 2700 - DNA, 22 bp, Homo sapiens
  source 1..22: mol_type = other DNA
aaaaggaaaaccagagatgtgg

SEQ ID NO: 2701 - DNA, 23 bp, Homo sapiens
  source 1..23: mol_type = other DNA
aataggaaacccactgggtctgc

SEQ ID NO: 2702 - DNA, 23 bp, Homo sapiens
  source 1..23: mol_type = other DNA
tacaggagaaccaggtattatgg

SEQ ID NO: 2703 - DNA, 23 bp, Homo sapiens
  source 1..23: mol_type = other DNA
tttaggaaaagcagagtgcctgg

SEQ ID NO: 2704 - DNA, 23 bp, Homo sapiens
  source 1..23: mol_type = other DNA
aataggaaaaccagtcaggcttg

SEQ ID NO: 2705 - DNA, 23 bp, Homo sapiens
  source 1..23: mol_type = other DNA
tttaagaaaaccagtgagggatt

SEQ ID NO: 2706 - DNA, 23 bp, Homo sapiens
  source 1..23: mol_type = other DNA
tgtaggaaaaacagtgtgtgtgt

SEQ ID NO: 2707 - DNA, 23 bp, Homo sapiens
  source 1..23: mol_type = other DNA
ggtaggaagaccattgaggatgg

SEQ ID NO: 2708 - DNA, 24 bp, Homo sapiens
  source 1..24: mol_type = other DNA
tacatgtaaaaacagtgagtcaag

SEQ ID NO: 2709 - DNA, 24 bp, Homo sapiens
  source 1..24: mol_type = other DNA
tataggaaaacctagttatccaga

SEQ ID NO: 2710 - DNA, 22 bp, Homo sapiens
  source 1..22: mol_type = other DNA
tttaggaaaaacagtggtcatg

SEQ ID NO: 2711 - DNA, 21 bp, Homo sapiens
  source 1..21: mol_type = other DNA
taaaggaatacctgaggctgg

SEQ ID NO: 2712 - DNA, 22 bp, Homo sapiens
  source 1..22: mol_type = other DNA
tggaggaaaaccagtattgcgg

SEQ ID NO: 2713 - DNA, 23 bp, Homo sapiens
  source 1..23: mol_type = other DNA
taaaggtaaacctgtgtcttggg

SEQ ID NO: 2714 - DNA, 23 bp, Homo sapiens
  source 1..23: mol_type = other DNA
tgtaggaaagacagtgggtgctg

SEQ ID NO: 2715 - DNA, 23 bp, Homo sapiens
  source 1..23: mol_type = other DNA
taaaagaaaaacactgagacaga

SEQ ID NO: 2716 - DNA, 23 bp, Homo sapiens
  source 1..23: mol_type = other DNA
aaaaggagaaggagagagtccgg

SEQ ID NO: 2717 - DNA, 23 bp, Homo sapiens
  source 1..23: mol_type = other DNA
tagggcaaaaccagtaagtgctg

SEQ ID NO: 2718 - DNA, 23 bp, Homo sapiens
  source 1..23: mol_type = other DNA
tatagatctagaagtgagtctgg

SEQ ID NO: 2719 - DNA, 25 bp, Homo sapiens
  source 1..25: mol_type = other DNA
tataggaaaaccatcaggattctgg

SEQ ID NO: 2720 - DNA, 22 bp, Homo sapiens
  source 1..22: mol_type = other DNA
tataagaaagctatgaatctgg

SEQ ID NO: 2721 - DNA, 22 bp, Homo sapiens
  source 1..22: mol_type = other DNA
aatagggaaaccaggaatcggc

SEQ ID NO: 2722 - DNA, 22 bp, Homo sapiens
  source 1..22: mol_type = other DNA
tatagaaaaagcaggagtcaaa

SEQ ID NO: 2723 - DNA, 22 bp, Homo sapiens
  source 1..22: mol_type = other DNA
tttattaaaactaggagtcagg

SEQ ID NO: 2724 - DNA, 22 bp, Homo sapiens
  source 1..22: mol_type = other DNA
catacgaagtccatgagtcagg

SEQ ID NO: 2725 - DNA, 23 bp, Homo sapiens
  source 1..23: mol_type = other DNA
atatggaaaaccagagaatcagg

SEQ ID NO: 2726 - DNA, 23 bp, Homo sapiens
  source 1..23: mol_type = other DNA
tacaggaaaaccagagagtgggc

SEQ ID NO: 2727 - DNA, 22 bp, Homo sapiens
  source 1..22: mol_type = other DNA
cataggaaaatcaggaatcagg

SEQ ID NO: 2728 - DNA, 22 bp, Homo sapiens
  source 1..22: mol_type = other DNA
tataagaaactagtgattctgg

SEQ ID NO: 2729 - DNA, 23 bp, Homo sapiens
  source 1..23: mol_type = other DNA
atcaggaaaaccagtgagaaggc

SEQ ID NO: 2730 - DNA, 22 bp, Homo sapiens
  source 1..22: mol_type = other DNA
aataagaaacccagtggtcagg

SEQ ID NO: 2731 - DNA, 23 bp, Homo sapiens
  source 1..23: mol_type = other DNA
tataaggaaaccagtgatattgg

SEQ ID NO: 2732 - DNA, 22 bp, Homo sapiens
  source 1..22: mol_type = other DNA
aataggtaaacagtgagcctgg

SEQ ID NO: 2733 - DNA, 22 bp, Homo sapiens
  source 1..22: mol_type = other DNA
cataggaaaccagagactcaag

SEQ ID NO: 2734 - DNA, 23 bp, Homo sapiens
  source 1..23: mol_type = other DNA
gtgaggaaaaccagtgtgttggg

SEQ ID NO: 2735 - DNA, 22 bp, Homo sapiens
  source 1..22: mol_type = other DNA
aatatgaaaaccaggagtatgg

SEQ ID NO: 2736 - DNA, 22 bp, Homo sapiens
  source 1..22: mol_type = other DNA
cttaggaaaccagtgactaggg

SEQ ID NO: 2737 - DNA, 23 bp, Homo sapiens
  source 1..23: mol_type = other DNA
tataggagatccagtgagacctg

SEQ ID NO: 2738 - DNA, 21 bp, Homo sapiens
  source 1..21: mol_type = other DNA
tgtaagaaacagtaagtcagg

SEQ ID NO: 2739 - DNA, 21 bp, Homo sapiens
  source 1..21: mol_type = other DNA
tataagaaaaccagttacggg

SEQ ID NO: 2740 - DNA, 23 bp, Homo sapiens
  source 1..23: mol_type = other DNA
tagagggaaaccagtgagccagg

SEQ ID NO: 2741 - DNA, 23 bp, Homo sapiens
  source 1..23: mol_type = other DNA
taaaggaaaaccaatgaatgcag

SEQ ID NO: 2742 - DNA, 22 bp, Homo sapiens
  source 1..22: mol_type = other DNA
aatgtgtaaaccagtgatctgg

SEQ ID NO: 2743 - DNA, 23 bp, Homo sapiens
  source 1..23: mol_type = other DNA
attagcaaaaccagtggctctgg

SEQ ID NO: 2744 - DNA, 23 bp, Homo sapiens
  source 1..23: mol_type = other DNA
tgaaggaagaccagtgagtcgag

SEQ ID NO: 2745 - DNA, 22 bp, Homo sapiens
  source 1..22: mol_type = other DNA
tatttaaaaccagtgagttgga

SEQ ID NO: 2746 - DNA, 22 bp, Homo sapiens
  source 1..22: mol_type = other DNA
tatggaaaaccacagaatcagg

SEQ ID NO: 2747 - DNA, 22 bp, Homo sapiens
  source 1..22: mol_type = other DNA
gtctggaaaaccagtagtcagg

SEQ ID NO: 2748 - DNA, 22 bp, Homo sapiens
  source 1..22: mol_type = other DNA
gagaggaaaaccaggagtgtgg

SEQ ID NO: 2749 - DNA, 22 bp, Homo sapiens
  source 1..22: mol_type = other DNA
aataagaaaacagtgaataagg

SEQ ID NO: 2750 - DNA, 23 bp, Homo sapiens
  source 1..23: mol_type = other DNA
ggtaggaaaccaggtgagtgagg

SEQ ID NO: 2751 - DNA, 23 bp, Homo sapiens
  source 1..23: mol_type = other DNA
aattaggaaatcagtgaatctgg

SEQ ID NO: 2752 - DNA, 22 bp, Homo sapiens
  source 1..22: mol_type = other DNA
tgtaggaaggccagtgatcaag

SEQ ID NO: 2753 - DNA, 23 bp, Homo sapiens
  source 1..23: mol_type = other DNA
tgcagggaaaccagagagctggg

SEQ ID NO: 2754 - DNA, 23 bp, Homo sapiens
  source 1..23: mol_type = other DNA
actaggaaaaccactgggtcagg

SEQ ID NO: 2755 - DNA, 23 bp, Homo sapiens
  source 1..23: mol_type = other DNA
tgtgggaaaaccagggaggcagg

SEQ ID NO: 2756 - DNA, 22 bp, Homo sapiens
  source 1..22: mol_type = other DNA
acaagaaaaaccaggagtcagg

SEQ ID NO: 2757 - DNA, 22 bp, Homo sapiens
  source 1..22: mol_type = other DNA
tttaggaaaaccagaaataggg

SEQ ID NO: 2758 - DNA, 22 bp, Homo sapiens
  source 1..22: mol_type = other DNA
tgtagcaaaaccagtggtcagc

SEQ ID NO: 2759 - DNA, 23 bp, Homo sapiens
  source 1..23: mol_type = other DNA
tcaagaaataccagtgagttggc

SEQ ID NO: 2760 - DNA, 23 bp, Homo sapiens
  source 1..23: mol_type = other DNA
aatgaggaaactagtgagtctgg

SEQ ID NO: 2761 - DNA, 23 bp, Homo sapiens
  source 1..23: mol_type = other DNA
tattggaaaaccagtgagaaaag

SEQ ID NO: 2762 - DNA, 23 bp, Homo sapiens
  source 1..23: mol_type = other DNA
agtaggaaaaaaagtgattctgg

SEQ ID NO: 2763 - DNA, 23 bp, Homo sapiens
  source 1..23: mol_type = other DNA
aaaagtaaaaccagtgagactgg

SEQ ID NO: 2764 - DNA, 24 bp, Homo sapiens
  source 1..24: mol_type = other DNA
cttaggaaaacctagtgaggtcgg

SEQ ID NO: 2765 - DNA, 22 bp, Homo sapiens
  source 1..22: mol_type = other DNA
tatgggaaaaccagaattcggg

SEQ ID NO: 2766 - DNA, 23 bp, Homo sapiens
  source 1..23: mol_type = other DNA
catattaaaaccagtgagagagg

SEQ ID NO: 2767 - DNA, 22 bp, Homo sapiens
  source 1..22: mol_type = other DNA
gataagaaaaccagggatcaga

SEQ ID NO: 2768 - DNA, 23 bp, Homo sapiens
  source 1..23: mol_type = other DNA
tacaggaaaaccagagatcaaag

SEQ ID NO: 2769 - DNA, 22 bp, Homo sapiens
  source 1..22: mol_type = other DNA
cataagaatccagggagtcagg

SEQ ID NO: 2770 - DNA, 22 bp, Homo sapiens
  source 1..22: mol_type = other DNA
tatcagtaaaccataagtctgg

SEQ ID NO: 2771 - DNA, 23 bp, Homo sapiens
  source 1..23: mol_type = other DNA
ataaggaaaaccagtgtgtctaa

SEQ ID NO: 2772 - DNA, 23 bp, Homo sapiens
  source 1..23: mol_type = other DNA
tataggaaacccagtgaccttca

SEQ ID NO: 2773 - DNA, 21 bp, Homo sapiens
  source 1..21: mol_type = other DNA
aatatgaaaaccagagactgg

SEQ ID NO: 2774 - DNA, 22 bp, Homo sapiens
  source 1..22: mol_type = other DNA
aatgagtaaaccagtagtcagg

SEQ ID NO: 2775 - DNA, 23 bp, Homo sapiens
  source 1..23: mol_type = other DNA
tataggaaaatcagtatatacag

SEQ ID NO: 2776 - DNA, 23 bp, Homo sapiens
  source 1..23: mol_type = other DNA
tataaggacaccagtgagattgg

SEQ ID NO: 2777 - DNA, 22 bp, Homo sapiens
  source 1..22: mol_type = other DNA
cccaggaaaaccagtggtgtgg

SEQ ID NO: 2778 - DNA, 22 bp, Homo sapiens
  source 1..22: mol_type = other DNA
tatagggaatacctgagtctgg

SEQ ID NO: 2779 - DNA, 22 bp, Homo sapiens
  source 1..22: mol_type = other DNA
actgggagaaccatgagtcggg

SEQ ID NO: 2780 - DNA, 23 bp, Homo sapiens
  source 1..23: mol_type = other DNA
aatctgaaaaacagtgagtaggt

SEQ ID NO: 2781 - DNA, 23 bp, Homo sapiens
  source 1..23: mol_type = other DNA
tcaaagaaagccagtgagttgga

SEQ ID NO: 2782 - DNA, 22 bp, Homo sapiens
  source 1..22: mol_type = other DNA
tttagaggaccagtgagttggg

SEQ ID NO: 2783 - DNA, 23 bp, Homo sapiens
  source 1..23: mol_type = other DNA
gctacgtaaaccagtgagccagg

SEQ ID NO: 2784 - DNA, 24 bp, Homo sapiens
  source 1..24: mol_type = other DNA
caaaggagaaaccagtaagtaggg

SEQ ID NO: 2785 - DNA, 22 bp, Homo sapiens
  source 1..22: mol_type = other DNA
aaatggaaaaccagtggtctag

SEQ ID NO: 2786 - DNA, 23 bp, Homo sapiens
  source 1..23: mol_type = other DNA
tagataaaaacaagtgagtctgg

SEQ ID NO: 2787 - DNA, 23 bp, Homo sapiens
  source 1..23: mol_type = other DNA
gaaaggaaaaacagtgagtagag

SEQ ID NO: 2788 - DNA, 23 bp, Homo sapiens
  source 1..23: mol_type = other DNA
aagtggaaaatcagtgattcagg

SEQ ID NO: 2789 - DNA, 22 bp, Homo sapiens
  source 1..22: mol_type = other DNA
tattagaaaaccaatgataggg

SEQ ID NO: 2790 - DNA, 23 bp, Homo sapiens
  source 1..23: mol_type = other DNA
gataggaaaatcagtgagcatga

SEQ ID NO: 2791 - DNA, 23 bp, Homo sapiens
  source 1..23: mol_type = other DNA
actaggaaaaccaatgaatgtgt

SEQ ID NO: 2792 - DNA, 22 bp, Homo sapiens
  source 1..22: mol_type = other DNA
cttaggaaaaccagggagcagc

SEQ ID NO: 2793 - DNA, 22 bp, Homo sapiens
  source 1..22: mol_type = other DNA
tgtggaataccagaaagtcggg

SEQ ID NO: 2794 - DNA, 22 bp, Homo sapiens
  source 1..22: mol_type = other DNA
gagaggaaaatcaggaatcagg

SEQ ID NO: 2795 - DNA, 22 bp, Homo sapiens
  source 1..22: mol_type = other DNA
aatagaaaaaccaatggtcaga

SEQ ID NO: 2796 - DNA, 22 bp, Homo sapiens
  source 1..22: mol_type = other DNA
tataagaaaacagtaaatctga

SEQ ID NO: 2797 - DNA, 22 bp, Homo sapiens
  source 1..22: mol_type = other DNA
tgtaagaaaacattgagtcaga

SEQ ID NO: 2798 - DNA, 23 bp, Homo sapiens
  source 1..23: mol_type = other DNA
tgtaggaaaacaagagaatacag

SEQ ID NO: 2799 - DNA, 24 bp, Homo sapiens
  source 1..24: mol_type = other DNA
catagtaaaactagtaagatctgg

SEQ ID NO: 2800 - DNA, 25 bp, Homo sapiens
  source 1..25: mol_type = other DNA
agtaggaaaactagtgaaaatctgg

SEQ ID NO: 2801 - DNA, 22 bp, Homo sapiens
  source 1..22: mol_type = other DNA
tagggaaaaccagtggatcaag

SEQ ID NO: 2802 - DNA, 22 bp, Homo sapiens
  source 1..22: mol_type = other DNA
tatacaaaaaccagaagtcggc

SEQ ID NO: 2803 - DNA, 22 bp, Homo sapiens
  source 1..22: mol_type = other DNA
tatagtaaacccagtagtgagg

SEQ ID NO: 2804 - DNA, 21 bp, Homo sapiens
  source 1..21: mol_type = other DNA
tgtaggaaacagtgattctag

SEQ ID NO: 2805 - DNA, 23 bp, Homo sapiens
  source 1..23: mol_type = other DNA
tgtaggaatcccagtgaggggtg

SEQ ID NO: 2806 - DNA, 23 bp, Homo sapiens
  source 1..23: mol_type = other DNA
tataggaactccagtgagggcta

SEQ ID NO: 2807 - DNA, 23 bp, Homo sapiens
  source 1..23: mol_type = other DNA
aataggaaaaacagtagaacagg

SEQ ID NO: 2808 - DNA, 23 bp, Homo sapiens
  source 1..23: mol_type = other DNA
taagctgaaaccagtgagcctgg

SEQ ID NO: 2809 - DNA, 23 bp, Homo sapiens
  source 1..23: mol_type = other DNA
gaaaggaaaatcagtgaggaggc

SEQ ID NO: 2810 - DNA, 23 bp, Homo sapiens
  source 1..23: mol_type = other DNA
cataagaaaaccagtaagtttag

SEQ ID NO: 2811 - DNA, 23 bp, Homo sapiens
  source 1..23: mol_type = other DNA
tcaatacaaaccagtgagtcccg

SEQ ID NO: 2812 - DNA, 23 bp, Homo sapiens
  source 1..23: mol_type = other DNA
tgtaggctgaccagtgagctggg

SEQ ID NO: 2813 - DNA, 22 bp, Homo sapiens
  source 1..22: mol_type = other DNA
aaaaggaaaactatgagtcagg

SEQ ID NO: 2814 - DNA, 24 bp, Homo sapiens
  source 1..24: mol_type = other DNA
tctacaaataaccagtgagcctgg

SEQ ID NO: 2815 - DNA, 22 bp, Homo sapiens
  source 1..22: mol_type = other DNA
gataagaaaaccaatattcagg

SEQ ID NO: 2816 - DNA, 23 bp, Homo sapiens
  source 1..23: mol_type = other DNA
tggggggaaaccagtgagccaag

SEQ ID NO: 2817 - DNA, 23 bp, Homo sapiens
  source 1..23: mol_type = other DNA
aaacagaaaaccaatgagtctgc

SEQ ID NO: 2818 - DNA, 23 bp, Homo sapiens
  source 1..23: mol_type = other DNA
tataggagttccagtgagacttg

SEQ ID NO: 2819 - DNA, 24 bp, Homo sapiens
  source 1..24: mol_type = other DNA
tagaaaaataaccagtgagttggg

SEQ ID NO: 2820 - DNA, 22 bp, Homo sapiens
  source 1..22: mol_type = other DNA
cataggaaaagcagtattctgc

SEQ ID NO: 2821 - DNA, 23 bp, Homo sapiens
  source 1..23: mol_type = other DNA
gataggtaaacaagtgggtatga

SEQ ID NO: 2822 - DNA, 23 bp, Homo sapiens
  source 1..23: mol_type = other DNA
gaaggcaaaaccagtgaggcctg

SEQ ID NO: 2823 - DNA, 23 bp, Homo sapiens
  source 1..23: mol_type = other DNA
tataggaatgccaatgatttttg

SEQ ID NO: 2824 - DNA, 22 bp, Homo sapiens
  source 1..22: mol_type = other DNA
aataagaaaacagtggttctgg

SEQ ID NO: 2825 - DNA, 23 bp, Homo sapiens
  source 1..23: mol_type = other DNA
cctaggaaaaccaatgaggcctc

SEQ ID NO: 2826 - DNA, 23 bp, Homo sapiens
  source 1..23: mol_type = other DNA
cttaggaaagccagtgaatactg

SEQ ID NO: 2827 - DNA, 23 bp, Homo sapiens
  source 1..23: mol_type = other DNA
tggaggaaaactagtgatttagg

SEQ ID NO: 2828 - DNA, 23 bp, Homo sapiens
  source 1..23: mol_type = other DNA
tctaagaaaaccactgaatcaga

SEQ ID NO: 2829 - DNA, 22 bp, Homo sapiens
  source 1..22: mol_type = other DNA
tgtaggaaagccaagagcctgg

SEQ ID NO: 2830 - DNA, 22 bp, Homo sapiens
  source 1..22: mol_type = other DNA
ggaaggaaaaccaggagtgagg

SEQ ID NO: 2831 - DNA, 22 bp, Homo sapiens
  source 1..22: mol_type = other DNA
gatatgaatccagggagtctgg

SEQ ID NO: 2832 - DNA, 22 bp, Homo sapiens
  source 1..22: mol_type = other DNA
tttaggaaaaccaatggtatga

SEQ ID NO: 2833 - DNA, 22 bp, Homo sapiens
  source 1..22: mol_type = other DNA
taaggcaaaaccagtggttagg

SEQ ID NO: 2834 - DNA, 23 bp, Homo sapiens
  source 1..23: mol_type = other DNA
tggaagaaaagcagtgagcaagg

SEQ ID NO: 2835 - DNA, 23 bp, Homo sapiens
  source 1..23: mol_type = other DNA
tatcagaaaaatcatgagtctgg

SEQ ID NO: 2836 - DNA, 23 bp, Homo sapiens
  source 1..23: mol_type = other DNA
tcaattaaaaccagtaagtcttg

SEQ ID NO: 2837 - DNA, 23 bp, Homo sapiens
  source 1..23: mol_type = other DNA
tataggcaaatcattgtttctgc

SEQ ID NO: 2838 - DNA, 22 bp, Homo sapiens
  source 1..22: mol_type = other DNA
tataggaaaatcaatagtctgt

SEQ ID NO: 2839 - DNA, 23 bp, Homo sapiens
  source 1..23: mol_type = other DNA
aatagaagatccagtgaatctgc

SEQ ID NO: 2840 - DNA, 23 bp, Homo sapiens
  source 1..23: mol_type = other DNA
caaagcaaaaccattgggacagg

SEQ ID NO: 2841 - DNA, 23 bp, Homo sapiens
  source 1..23: mol_type = other DNA
taaaggaaaaacagttttttggg

SEQ ID NO: 2842 - DNA, 22 bp, Homo sapiens
  source 1..22: mol_type = other DNA
catagaaaaccaggtggtcagg

SEQ ID NO: 2843 - DNA, 22 bp, Homo sapiens
  source 1..22: mol_type = other DNA
tgtaggaaaccaaggagacagg

SEQ ID NO: 2844 - DNA, 22 bp, Homo sapiens
  source 1..22: mol_type = other DNA
cacaggaagaccatgaatctgg

SEQ ID NO: 2845 - DNA, 21 bp, Homo sapiens
  source 1..21: mol_type = other DNA
tataggagccaatgagtaggg

SEQ ID NO: 2846 - DNA, 21 bp, Homo sapiens
  source 1..21: mol_type = other DNA
tataagaaaactagggtcagg

SEQ ID NO: 2847 - DNA, 22 bp, Homo sapiens
  source 1..22: mol_type = other DNA
tataggaaaccagtaaagctga

SEQ ID NO: 2848 - DNA, 22 bp, Homo sapiens
  source 1..22: mol_type = other DNA
tgtaggaaaagagtaattcagg

SEQ ID NO: 2849 - DNA, 22 bp, Homo sapiens
  source 1..22: mol_type = other DNA
tataagaaaaccaatattcttg

SEQ ID NO: 2850 - DNA, 22 bp, Homo sapiens
  source 1..22: mol_type = other DNA
gctaggaaagcaagtggtcagg

SEQ ID NO: 2851 - DNA, 21 bp, Homo sapiens
  source 1..21: mol_type = other DNA
aaaaggaaaacctgactcagg

SEQ ID NO: 2852 - DNA, 23 bp, Homo sapiens
  source 1..23: mol_type = other DNA
aataggaaaaccagttagaccca

SEQ ID NO: 2853 - DNA, 23 bp, Homo sapiens
  source 1..23: mol_type = other DNA
actaggaaaacaagtggggaggg

SEQ ID NO: 2854 - DNA, 23 bp, Homo sapiens
  source 1..23: mol_type = other DNA
gactggaaaaacagtgattctga

SEQ ID NO: 2855 - DNA, 23 bp, Homo sapiens
  source 1..23: mol_type = other DNA
aatacgaaaagcagtcaggcgtg

SEQ ID NO: 2856 - DNA, 23 bp, Homo sapiens
  source 1..23: mol_type = other DNA
tagagaaaaacaagtaaataagg

SEQ ID NO: 2857 - DNA, 24 bp, Homo sapiens
  source 1..24: mol_type = other DNA
tataggaagagccagtttgtgagg

SEQ ID NO: 2858 - DNA, 21 bp, Homo sapiens
  source 1..21: mol_type = other DNA
tatagaaacccatgagtcaga

SEQ ID NO: 2859 - DNA, 21 bp, Homo sapiens
  source 1..21: mol_type = other DNA
tgtaaaaaccagggagacagg

SEQ ID NO: 2860 - DNA, 23 bp, Homo sapiens
  source 1..23: mol_type = other DNA
agtaggaagaccagtaagtaggc

SEQ ID NO: 2861 - DNA, 23 bp, Homo sapiens
  source 1..23: mol_type = other DNA
tataggaataccagtaagtgtgg

SEQ ID NO: 2862 - DNA, 22 bp, Homo sapiens
  source 1..22: mol_type = other DNA
tgtaggattccagtgagtcagg

SEQ ID NO: 2863 - DNA, 22 bp, Homo sapiens
  source 1..22: mol_type = other DNA
tatagagaaacagtgagtcaag

SEQ ID NO: 2864 - DNA, 22 bp, Homo sapiens
  source 1..22: mol_type = other DNA
aatagaaaaaccagaagtcagg

SEQ ID NO: 2865 - DNA, 23 bp, Homo sapiens
  source 1..23: mol_type = other DNA
aatagggaaaccagggagctggt

SEQ ID NO: 2866 - DNA, 22 bp, Homo sapiens
  source 1..22: mol_type = other DNA
tataagaaatcagtgagtgcag

SEQ ID NO: 2867 - DNA, 23 bp, Homo sapiens
  source 1..23: mol_type = other DNA
tatgagaaaaccagtgacctgga

SEQ ID NO: 2868 - DNA, 22 bp, Homo sapiens
  source 1..22: mol_type = other DNA
cataggataaccagaaatctgg

SEQ ID NO: 2869 - DNA, 23 bp, Homo sapiens
  source 1..23: mol_type = other DNA
agtagggaaaccagtgagtagac

SEQ ID NO: 2870 - DNA, 23 bp, Homo sapiens
  source 1..23: mol_type = other DNA
acaaggaaaaccagtaagtgtgg

SEQ ID NO: 2871 - DNA, 22 bp, Homo sapiens
  source 1..22: mol_type = other DNA
aatagtaaatccagtggtccgg

SEQ ID NO: 2872 - DNA, 22 bp, Homo sapiens
  source 1..22: mol_type = other DNA
tataagaaaccagtgagggctg

SEQ ID NO: 2873 - DNA, 23 bp, Homo sapiens
  source 1..23: mol_type = other DNA
tatagaaacaccagtgattctga

SEQ ID NO: 2874 - DNA, 22 bp, Homo sapiens
  source 1..22: mol_type = other DNA
aataagaaaccattgaatcagg

SEQ ID NO: 2875 - DNA, 23 bp, Homo sapiens
  source 1..23: mol_type = other DNA
gacaaggaaaccagtgagtctgg

SEQ ID NO: 2876 - DNA, 22 bp, Homo sapiens
  source 1..22: mol_type = other DNA
cttagcaaaaccaatgagcagg

SEQ ID NO: 2877 - DNA, 23 bp, Homo sapiens
  source 1..23: mol_type = other DNA
tgagaggaaaccagtgagtcaga

SEQ ID NO: 2878 - DNA, 23 bp, Homo sapiens
  source 1..23: mol_type = other DNA
acctggaaaaccagtgaggctgg

SEQ ID NO: 2879 - DNA, 23 bp, Homo sapiens
  source 1..23: mol_type = other DNA
aaaaggaaaaccagtgagggctg

SEQ ID NO: 2880 - DNA, 23 bp, Homo sapiens
  source 1..23: mol_type = other DNA
gaaataaaaaccagtgagttgga

SEQ ID NO: 2881 - DNA, 22 bp, Homo sapiens
  source 1..22: mol_type = other DNA
catagggaaaacaatgagcagg

SEQ ID NO: 2882 - DNA, 22 bp, Homo sapiens
  source 1..22: mol_type = other DNA
aataaggaaaccaggattcagg

SEQ ID NO: 2883 - DNA, 22 bp, Homo sapiens
  source 1..22: mol_type = other DNA
aataagaaaaacaggaatctgg

SEQ ID NO: 2884 - DNA, 23 bp, Homo sapiens
  source 1..23: mol_type = other DNA
tgaaggaaaaccagttagtaagg

SEQ ID NO: 2885 - DNA, 23 bp, Homo sapiens
  source 1..23: mol_type = other DNA
tgtggtaaaaccagtgagttgtg

SEQ ID NO: 2886 - DNA, 22 bp, Homo sapiens
  source 1..22: mol_type = other DNA
attaggaaaaccaggagagggg

SEQ ID NO: 2887 - DNA, 21 bp, Homo sapiens
  source 1..21: mol_type = other DNA
ggtaggaaaaccagagtaggg

SEQ ID NO: 2888 - DNA, 22 bp, Homo sapiens
  source 1..22: mol_type = other DNA
catatataaccagtgagtaggg

SEQ ID NO: 2889 - DNA, 22 bp, Homo sapiens
  source 1..22: mol_type = other DNA
taaggaaaaccactgactgggt

SEQ ID NO: 2890 - DNA, 23 bp, Homo sapiens
  source 1..23: mol_type = other DNA
tactagaaaaccagtgactaggc

SEQ ID NO: 2891 - DNA, 22 bp, Homo sapiens
  source 1..22: mol_type = other DNA
tttataaaaccactgagttagg

SEQ ID NO: 2892 - DNA, 22 bp, Homo sapiens
  source 1..22: mol_type = other DNA
gataggcaaaccatgagtaagg

SEQ ID NO: 2893 - DNA, 23 bp, Homo sapiens
  source 1..23: mol_type = other DNA
gacaagaaaaccagtgaggctgg

SEQ ID NO: 2894 - DNA, 21 bp, Homo sapiens
  source 1..21: mol_type = other DNA
gataggaaaatcagaatcagg

SEQ ID NO: 2895 - DNA, 23 bp, Homo sapiens
  source 1..23: mol_type = other DNA
aataaataaaccagtgagtgagt

SEQ ID NO: 2896 - DNA, 23 bp, Homo sapiens
  source 1..23: mol_type = other DNA
tatagggaaaccagtatgatagg

SEQ ID NO: 2897 - DNA, 23 bp, Homo sapiens
  source 1..23: mol_type = other DNA
tacaagaaaaccagtgagtcaaa

SEQ ID NO: 2898 - DNA, 24 bp, Homo sapiens
  source 1..24: mol_type = other DNA
aataggagaaacaggtgagtaagg

SEQ ID NO: 2899 - DNA, 22 bp, Homo sapiens
  source 1..22: mol_type = other DNA
ttttagaaaaccatgagtccag

SEQ ID NO: 2900 - DNA, 21 bp, Homo sapiens
  source 1..21: mol_type = other DNA
tataggaaatagtgagtcctg

SEQ ID NO: 2901 - DNA, 23 bp, Homo sapiens
  source 1..23: mol_type = other DNA
tataagaaaaccagtcagaatgg

SEQ ID NO: 2902 - DNA, 24 bp, Homo sapiens
  source 1..24: mol_type = other DNA
gaaaggaaaaccagatgagtttgg

SEQ ID NO: 2903 - DNA, 22 bp, Homo sapiens
  source 1..22: mol_type = other DNA
tattggaaaacagtgagactgg

SEQ ID NO: 2904 - DNA, 22 bp, Homo sapiens
  source 1..22: mol_type = other DNA
tatagtataaacagtaagcagg

SEQ ID NO: 2905 - DNA, 23 bp, Homo sapiens
  source 1..23: mol_type = other DNA
tataggtaaacctgtgtcatggg

SEQ ID NO: 2906 - DNA, 23 bp, Homo sapiens
  source 1..23: mol_type = other DNA
gtaaggaaagccagtgtgtctgg

SEQ ID NO: 2907 - DNA, 23 bp, Homo sapiens
  source 1..23: mol_type = other DNA
gataagataaccagttagtgggt

SEQ ID NO: 2908 - DNA, 22 bp, Homo sapiens
  source 1..22: mol_type = other DNA
tgcaggaaaaccaatgatcaga

SEQ ID NO: 2909 - DNA, 23 bp, Homo sapiens
  source 1..23: mol_type = other DNA
tatagaaaaaccatgaaagcagg

SEQ ID NO: 2910 - DNA, 22 bp, Homo sapiens
  source 1..22: mol_type = other DNA
aatatgaaaaccagttataggg

SEQ ID NO: 2911 - DNA, 21 bp, Homo sapiens
  source 1..21: mol_type = other DNA
gattagaaaaccagagtcagg

SEQ ID NO: 2912 - DNA, 23 bp, Homo sapiens
  source 1..23: mol_type = other DNA
tttatgaaaaccagtaagtctgc

SEQ ID NO: 2913 - DNA, 23 bp, Homo sapiens
  source 1..23: mol_type = other DNA
gataggaaaaccagttaggaggc

SEQ ID NO: 2914 - DNA, 22 bp, Homo sapiens
  source 1..22: mol_type = other DNA
tatagtaaactagtgggtaggg

SEQ ID NO: 2915 - DNA, 23 bp, Homo sapiens
  source 1..23: mol_type = other DNA
ggaaacaaaaccagtgagtcggt

SEQ ID NO: 2916 - DNA, 22 bp, Homo sapiens
  source 1..22: mol_type = other DNA
aatttgaaaaccagtgatcaag

SEQ ID NO: 2917 - DNA, 22 bp, Homo sapiens
  source 1..22: mol_type = other DNA
aagaggagaaccattgatcggg

SEQ ID NO: 2918 - DNA, 24 bp, Homo sapiens
  source 1..24: mol_type = other DNA
aggaggaaaaccagtagagtgtgg

SEQ ID NO: 2919 - DNA, 23 bp, Homo sapiens
  source 1..23: mol_type = other DNA
ggcgggaaaaccagcgagtccag

SEQ ID NO: 2920 - DNA, 23 bp, Homo sapiens
  source 1..23: mol_type = other DNA
tggaggaaggccagtgagtcagg

SEQ ID NO: 2921 - DNA, 24 bp, Homo sapiens
  source 1..24: mol_type = other DNA
gataggaaaaacaagaaagtcagg

SEQ ID NO: 2922 - DNA, 23 bp, Homo sapiens
  source 1..23: mol_type = other DNA
gatacggaaaccacggagtcggg

SEQ ID NO: 2923 - DNA, 22 bp, Homo sapiens
  source 1..22: mol_type = other DNA
tattctaaaccagtaagtctgg

SEQ ID NO: 2924 - DNA, 22 bp, Homo sapiens
  source 1..22: mol_type = other DNA
gataggaattcagtgagtctgc

SEQ ID NO: 2925 - DNA, 21 bp, Homo sapiens
  source 1..21: mol_type = other DNA
gttaggaaagccagtgtctgg

SEQ ID NO: 2926 - DNA, 23 bp, Homo sapiens
  source 1..23: mol_type = other DNA
tatagaacaaacagtgattcagg

SEQ ID NO: 2927 - DNA, 21 bp, Homo sapiens
  source 1..21: mol_type = other DNA
ttttggtaacagtgagtcagg

SEQ ID NO: 2928 - DNA, 23 bp, Homo sapiens
  source 1..23: mol_type = other DNA
tgaaggaaaaccagtaagcagag

SEQ ID NO: 2929 - DNA, 24 bp, Homo sapiens
  source 1..24: mol_type = other DNA
tatagcaaaaccactgttgtatgg

SEQ ID NO: 2930 - DNA, 22 bp, Homo sapiens
  source 1..22: mol_type = other DNA
taaggcaaaccactgagtcttt

SEQ ID NO: 2931 - DNA, 23 bp, Homo sapiens
  source 1..23: mol_type = other DNA
aatagaaaaagcattgaatcagg

SEQ ID NO: 2932 - DNA, 23 bp, Homo sapiens
  source 1..23: mol_type = other DNA
tcttggaaaaccagaaggtctgg

SEQ ID NO: 2933 - DNA, 23 bp, Homo sapiens
  source 1..23: mol_type = other DNA
aatagcaagaccagaaagtctgg

SEQ ID NO: 2934 - DNA, 22 bp, Homo sapiens
  source 1..22: mol_type = other DNA
aataggaaaccctggagtcagg

SEQ ID NO: 2935 - DNA, 23 bp, Homo sapiens
  source 1..23: mol_type = other DNA
taaaggaaaacctgggactcagt

SEQ ID NO: 2936 - DNA, 23 bp, Homo sapiens
  source 1..23: mol_type = other DNA
tataggaaaaacactgtttccag

SEQ ID NO: 2937 - DNA, 23 bp, Homo sapiens
  source 1..23: mol_type = other DNA
tatagtagtactagtgagttctg

SEQ ID NO: 2938 - DNA, 23 bp, Homo sapiens
  source 1..23: mol_type = other DNA
ccaagtaaaaccagtgattctgc

SEQ ID NO: 2939 - DNA, 23 bp, Homo sapiens
  source 1..23: mol_type = other DNA
aaatggtaaaccagtgagccgtg

SEQ ID NO: 2940 - DNA, 23 bp, Homo sapiens
  source 1..23: mol_type = other DNA
aataggaataccattgaatctat

SEQ ID NO: 2941 - DNA, 24 bp, Homo sapiens
  source 1..24: mol_type = other DNA
tatgggaaagccaagagagccggg

SEQ ID NO: 2942 - DNA, 22 bp, Homo sapiens
  source 1..22: mol_type = other DNA
tataagaaaccagagaggcttg

SEQ ID NO: 2943 - DNA, 22 bp, Homo sapiens
  source 1..22: mol_type = other DNA
caaagaaaaaccatgagtcatg

SEQ ID NO: 2944 - DNA, 23 bp, Homo sapiens
  source 1..23: mol_type = other DNA
ttttagaaaaacagtgagtcaaa

SEQ ID NO: 2945 - DNA, 23 bp, Homo sapiens
  source 1..23: mol_type = other DNA
gactggaacaccagtgagacaga

SEQ ID NO: 2946 - DNA, 22 bp, Homo sapiens
  source 1..22: mol_type = other DNA
tatagcaaaccatgaagtcagg

SEQ ID NO: 2947 - DNA, 22 bp, Homo sapiens
  source 1..22: mol_type = other DNA
taaaggaaaaccatgactatgg

SEQ ID NO: 2948 - DNA, 23 bp, Homo sapiens
  source 1..23: mol_type = other DNA
aaaaacaaaaccagtgagctagg

SEQ ID NO: 2949 - DNA, 23 bp, Homo sapiens
  source 1..23: mol_type = other DNA
tataggaatgcctgtgatttttg

SEQ ID NO: 2950 - DNA, 23 bp, Homo sapiens
  source 1..23: mol_type = other DNA
tagaggaaaaccagacattatag

SEQ ID NO: 2951 - DNA, 23 bp, Homo sapiens
  source 1..23: mol_type = other DNA
taaaggaaaaacactcagtatga

SEQ ID NO: 2952 - DNA, 23 bp, Homo sapiens
  source 1..23: mol_type = other DNA
tatatttaaagccatgagtcagg

SEQ ID NO: 2953 - DNA, 23 bp, Homo sapiens
  source 1..23: mol_type = other DNA
tctagggaaaccagtagagcagg

SEQ ID NO: 2954 - DNA, 22 bp, Homo sapiens
  source 1..22: mol_type = other DNA
tacagcaaaagcagtactcagg

SEQ ID NO: 2955 - DNA, 22 bp, Homo sapiens
  source 1..22: mol_type = other DNA
tattgaaagaccagtgatcatg

SEQ ID NO: 2956 - DNA, 22 bp, Homo sapiens
  source 1..22: mol_type = other DNA
tataggaaaacagagtgtcagc

SEQ ID NO: 2957 - DNA, 22 bp, Homo sapiens
  source 1..22: mol_type = other DNA
gatagaaacaccatgaatcagg

SEQ ID NO: 2958 - DNA, 22 bp, Homo sapiens
  source 1..22: mol_type = other DNA
tatatgaaaccagtaagtttgg

SEQ ID NO: 2959 - DNA, 22 bp, Homo sapiens
  source 1..22: mol_type = other DNA
aataagaaaaccagaaatcagg

SEQ ID NO: 2960 - DNA, 22 bp, Homo sapiens
  source 1..22: mol_type = other DNA
tggaggaaaccagtaagtctga

SEQ ID NO: 2961 - DNA, 22 bp, Homo sapiens
  source 1..22: mol_type = other DNA
aataggcaaccaatgagtcaag

SEQ ID NO: 2962 - DNA, 23 bp, Homo sapiens
  source 1..23: mol_type = other DNA
cataggaaaacaagtaattctgg

SEQ ID NO: 2963 - DNA, 22 bp, Homo sapiens
  source 1..22: mol_type = other DNA
tgtagggaacctttgagtcagg

SEQ ID NO: 2964 - DNA, 23 bp, Homo sapiens
  source 1..23: mol_type = other DNA
cctaggaaaaccagtgatgtggt

SEQ ID NO: 2965 - DNA, 22 bp, Homo sapiens
  source 1..22: mol_type = other DNA
agtaggaaagcctgtgatcagg

SEQ ID NO: 2966 - DNA, 23 bp, Homo sapiens
  source 1..23: mol_type = other DNA
attaagaaagccagtgagctggg

SEQ ID NO: 2967 - DNA, 22 bp, Homo sapiens
  source 1..22: mol_type = other DNA
ttatggaaaaccatgtgtcagg

SEQ ID NO: 2968 - DNA, 22 bp, Homo sapiens
  source 1..22: mol_type = other DNA
aatagtcaaccagtgagtgtgg

SEQ ID NO: 2969 - DNA, 22 bp, Homo sapiens
  source 1..22: mol_type = other DNA
tataagtaaccagtgaatcatg

SEQ ID NO: 2970 - DNA, 23 bp, Homo sapiens
  source 1..23: mol_type = other DNA
ctgaggaaaagcagtgagtcagg

SEQ ID NO: 2971 - DNA, 22 bp, Homo sapiens
  source 1..22: mol_type = other DNA
tatagtagaaccaggaatccag

SEQ ID NO: 2972 - DNA, 23 bp, Homo sapiens
  source 1..23: mol_type = other DNA
tataggaaatgcagagagtctgg

SEQ ID NO: 2973 - DNA, 24 bp, Homo sapiens
  source 1..24: mol_type = other DNA
ggtaggaagatcagtgagctcagg

SEQ ID NO: 2974 - DNA, 23 bp, Homo sapiens
  source 1..23: mol_type = other DNA
tgcattaaaaccagtgattcaga

SEQ ID NO: 2975 - DNA, 22 bp, Homo sapiens
  source 1..22: mol_type = other DNA
tatataaatccagtgagtgggg

SEQ ID NO: 2976 - DNA, 22 bp, Homo sapiens
  source 1..22: mol_type = other DNA
ggtatgaataccaggagtcagg

SEQ ID NO: 2977 - DNA, 22 bp, Homo sapiens
  source 1..22: mol_type = other DNA
cataggaaaaccaatgttgtgg

SEQ ID NO: 2978 - DNA, 23 bp, Homo sapiens
  source 1..23: mol_type = other DNA
tgtagtgaaaccagtgaattgag

SEQ ID NO: 2979 - DNA, 23 bp, Homo sapiens
  source 1..23: mol_type = other DNA
aagaggaaaaccagagagtcagt

SEQ ID NO: 2980 - DNA, 24 bp, Homo sapiens
  source 1..24: mol_type = other DNA
agtaggagaaacaagtgagtcaag

SEQ ID NO: 2981 - DNA, 23 bp, Homo sapiens
  source 1..23: mol_type = other DNA
tatagtacaaccagtgaggccag

SEQ ID NO: 2982 - DNA, 22 bp, Homo sapiens
  source 1..22: mol_type = other DNA
cataaaataccagtgagtcaag

SEQ ID NO: 2983 - DNA, 22 bp, Homo sapiens
  source 1..22: mol_type = other DNA
tatagagaactactgagtcgag

SEQ ID NO: 2984 - DNA, 23 bp, Homo sapiens
  source 1..23: mol_type = other DNA
tgtaggtaaaccaaataatctgg

SEQ ID NO: 2985 - DNA, 23 bp, Homo sapiens
  source 1..23: mol_type = other DNA
taaggaaaagccagtgagtagga

SEQ ID NO: 2986 - DNA, 23 bp, Homo sapiens
  source 1..23: mol_type = other DNA
aatccaaaaaccagtgagttagg

SEQ ID NO: 2987 - DNA, 23 bp, Homo sapiens
  source 1..23: mol_type = other DNA
aataggaataccactgtttcagg

SEQ ID NO: 2988 - DNA, 23 bp, Homo sapiens
  source 1..23: mol_type = other DNA
gccatgtaaaccagtgagtctgt

SEQ ID NO: 2989 - DNA, 23 bp, Homo sapiens
  source 1..23: mol_type = other DNA
aataggaatacaagtaagtacag

SEQ ID NO: 2990 - DNA, 23 bp, Homo sapiens
  source 1..23: mol_type = other DNA
aataggaagaccaatgacagggg

SEQ ID NO: 2991 - DNA, 23 bp, Homo sapiens
  source 1..23: mol_type = other DNA
aatagagaaacaaatgagtctgg

SEQ ID NO: 2992 - DNA, 23 bp, Homo sapiens
  source 1..23: mol_type = other DNA
tataggaaaatcagtgaaagtag

SEQ ID NO: 2993 - DNA, 24 bp, Homo sapiens
  source 1..24: mol_type = other DNA
tataggtgagaccagtgagtttgg

SEQ ID NO: 2994 - DNA, 23 bp, Homo sapiens
  source 1..23: mol_type = other DNA
tcaaaataaaccagtgagttagg

SEQ ID NO: 2995 - DNA, 22 bp, Homo sapiens
  source 1..22: mol_type = other DNA
tattgaaaaccagtgagtgtga

SEQ ID NO: 2996 - DNA, 23 bp, Homo sapiens
  source 1..23: mol_type = other DNA
tatatgaaaaccaaggagcagga

SEQ ID NO: 2997 - DNA, 22 bp, Homo sapiens
  source 1..22: mol_type = other DNA
aatcggaaaaccagtgatctgc

SEQ ID NO: 2998 - DNA, 23 bp, Homo sapiens
  source 1..23: mol_type = other DNA
tttaaaacaaccaatgagtctga

SEQ ID NO: 2999 - DNA, 22 bp, Homo sapiens
  source 1..22: mol_type = other DNA
aataggaaaatcagaagacagg

SEQ ID NO: 3000 - DNA, 21 bp, Homo sapiens
  source 1..21: mol_type = other DNA
aataggtataccagtgtctgg

SEQ ID NO: 3001 - DNA, 23 bp, Homo sapiens
  source 1..23: mol_type = other DNA
gctgtgaaaaccagagagtctcg

SEQ ID NO: 3002 - DNA, 23 bp, Homo sapiens
  source 1..23: mol_type = other DNA
caaaagaaaaccagtgatgtggg

SEQ ID NO: 3003 - DNA, 23 bp, Homo sapiens
  source 1..23: mol_type = other DNA
tgtggtaacaccagtgagtcagg

SEQ ID NO: 3004 - DNA, 23 bp, Homo sapiens
  source 1..23: mol_type = other DNA
aacatgaaaaccagtaagtcagc

SEQ ID NO: 3005 - DNA, 22 bp, Homo sapiens
  source 1..22: mol_type = other DNA
aagatgaaaaccagtggcctgg

SEQ ID NO: 3006 - DNA, 23 bp, Homo sapiens
  source 1..23: mol_type = other DNA
tgattgaaaaccactgagtaagg

SEQ ID NO: 3007 - DNA, 22 bp, Homo sapiens
  source 1..22: mol_type = other DNA
tactagaaaacagtgagtcatg

SEQ ID NO: 3008 - DNA, 23 bp, Homo sapiens
  source 1..23: mol_type = other DNA
catagtggaaccagtgagtcact

SEQ ID NO: 3009 - DNA, 22 bp, Homo sapiens
  source 1..22: mol_type = other DNA
gataagaaacaagtgagccagg

SEQ ID NO: 3010 - DNA, 23 bp, Homo sapiens
  source 1..23: mol_type = other DNA
aataggaatagcattgaatctgt

SEQ ID NO: 3011 - DNA, 23 bp, Homo sapiens
  source 1..23: mol_type = other DNA
agtaggaaaaccaatgaatctca

SEQ ID NO: 3012 - DNA, 22 bp, Homo sapiens
  source 1..22: mol_type = other DNA
tatatgaaagccagtggtatgg

SEQ ID NO: 3013 - DNA, 23 bp, Homo sapiens
  source 1..23: mol_type = other DNA
tttaggagtaggagtgagccagg

SEQ ID NO: 3014 - DNA, 23 bp, Homo sapiens
  source 1..23: mol_type = other DNA
gagaggaaaagtagtgagttagg

SEQ ID NO: 3015 - DNA, 23 bp, Homo sapiens
  source 1..23: mol_type = other DNA
aatgttaaaaccactgagactgg

SEQ ID NO: 3016 - DNA, 23 bp, Homo sapiens
  source 1..23: mol_type = other DNA
gaaaacaaaaccagtgaggcagg

SEQ ID NO: 3017 - DNA, 23 bp, Homo sapiens
  source 1..23: mol_type = other DNA
tataggaatactagtaagtcatc

SEQ ID NO: 3018 - DNA, 21 bp, Homo sapiens
  source 1..21: mol_type = other DNA
cattgaaaccagtgggtctgg

SEQ ID NO: 3019 - DNA, 23 bp, Homo sapiens
  source 1..23: mol_type = other DNA
tatatgaataccagtgagcgatt

SEQ ID NO: 3020 - DNA, 23 bp, Homo sapiens
  source 1..23: mol_type = other DNA
tataataaaacccttgagttagg

SEQ ID NO: 3021 - DNA, 23 bp, Homo sapiens
  source 1..23: mol_type = other DNA
tataagaaaaccactgaatggta

SEQ ID NO: 3022 - DNA, 23 bp, Homo sapiens
  source 1..23: mol_type = other DNA
gagtgacaaaccagtgactcagg

SEQ ID NO: 3023 - DNA, 23 bp, Homo sapiens
  source 1..23: mol_type = other DNA
tggaaagaaaccagtgagacagg

SEQ ID NO: 3024 - DNA, 22 bp, Homo sapiens
  source 1..22: mol_type = other DNA
aatagaaatccaatgagtttgg

SEQ ID NO: 3025 - DNA, 22 bp, Homo sapiens
  source 1..22: mol_type = other DNA
gatgtaacaccagtgagtgagg

SEQ ID NO: 3026 - DNA, 21 bp, Homo sapiens
  source 1..21: mol_type = other DNA
aataggtaaaccagagttggg

SEQ ID NO: 3027 - DNA, 23 bp, Homo sapiens
  source 1..23: mol_type = other DNA
tagagaaaaaccagtgaaactaa

SEQ ID NO: 3028 - DNA, 23 bp, Homo sapiens
  source 1..23: mol_type = other DNA
tatagaaaaacagtggagactgg

SEQ ID NO: 3029 - DNA, 23 bp, Homo sapiens
  source 1..23: mol_type = other DNA
tataggatacacagtgattaaga

SEQ ID NO: 3030 - DNA, 23 bp, Homo sapiens
  source 1..23: mol_type = other DNA
tatagggaaaaaaatgagtttgg

SEQ ID NO: 3031 - DNA, 23 bp, Homo sapiens
  source 1..23: mol_type = other DNA
tagaggaaaagaagagagtcagg

SEQ ID NO: 3032 - DNA, 23 bp, Homo sapiens
  source 1..23: mol_type = other DNA
tatagaaaaaccaaagaatatgt

SEQ ID NO: 3033 - DNA, 22 bp, Homo sapiens
  source 1..22: mol_type = other DNA
cacaagaatacagtgagtcagg

SEQ ID NO: 3034 - DNA, 22 bp, Homo sapiens
  source 1..22: mol_type = other DNA
aagaggaaagccagtggtgtgg

SEQ ID NO: 3035 - DNA, 21 bp, Homo sapiens
  source 1..21: mol_type = other DNA
cataggaaaacgtgtgtcatg

SEQ ID NO: 3036 - DNA, 22 bp, Homo sapiens
  source 1..22: mol_type = other DNA
tatagcaaaagcagtagtctag

SEQ ID NO: 3037 - DNA, 23 bp, Homo sapiens
  source 1..23: mol_type = other DNA
gataggaatagcattgaatctgc

SEQ ID NO: 3038 - DNA, 23 bp, Homo sapiens
  source 1..23: mol_type = other DNA
tgtagcaacaccagagaggcaga

SEQ ID NO: 3039 - DNA, 23 bp, Homo sapiens
  source 1..23: mol_type = other DNA
tttttaaaaaccagtgattcaga

SEQ ID NO: 3040 - DNA, 22 bp, Homo sapiens
  source 1..22: mol_type = other DNA
tatagaaaaacagtgaaagggg

SEQ ID NO: 3041 - DNA, 21 bp, Homo sapiens
  source 1..21: mol_type = other DNA
tataggaaccagcaattcagg

SEQ ID NO: 3042 - DNA, 22 bp, Homo sapiens
  source 1..22: mol_type = other DNA
cataggataaccagtggtgaga

SEQ ID NO: 3043 - DNA, 22 bp, Homo sapiens
  source 1..22: mol_type = other DNA
gatagtaaaccagtgagtaggc

SEQ ID NO: 3044 - DNA, 23 bp, Homo sapiens
  source 1..23: mol_type = other DNA
aatacggaaaaccatgagtctgg

SEQ ID NO: 3045 - DNA, 23 bp, Homo sapiens
  source 1..23: mol_type = other DNA
aatagtgaaaccagtgagcctgg

SEQ ID NO: 3046 - DNA, 23 bp, Homo sapiens
  source 1..23: mol_type = other DNA
gataggaaatccagtaagtaggg

SEQ ID NO: 3047 - DNA, 23 bp, Homo sapiens
  source 1..23: mol_type = other DNA
taaaggaaaaccagtgggtctgg

SEQ ID NO: 3048 - DNA, 24 bp, Homo sapiens
  source 1..24: mol_type = other DNA
tataggagaaaacagtgattctgg

SEQ ID NO: 3049 - DNA, 23 bp, Homo sapiens
  source 1..23: mol_type = other DNA
gacaaggaaaccagtgagtctag

SEQ ID NO: 3050 - DNA, 22 bp, Homo sapiens
  source 1..22: mol_type = other DNA
aatagggaaaccaggaataagg

SEQ ID NO: 3051 - DNA, 22 bp, Homo sapiens
  source 1..22: mol_type = other DNA
gatagaataccagtgagctggg

SEQ ID NO: 3052 - DNA, 22 bp, Homo sapiens
  source 1..22: mol_type = other DNA
gataggaaaacagagagacagg

SEQ ID NO: 3053 - DNA, 22 bp, Homo sapiens
  source 1..22: mol_type = other DNA
aggaggaaaatcaggagtctgg

SEQ ID NO: 3054 - DNA, 22 bp, Homo sapiens
  source 1..22: mol_type = other DNA
tataagaaaaccatgagaaagg

SEQ ID NO: 3055 - DNA, 23 bp, Homo sapiens
  source 1..23: mol_type = other DNA
tcaagggaaaccagtgagtggga

SEQ ID NO: 3056 - DNA, 22 bp, Homo sapiens
  source 1..22: mol_type = other DNA
tggaggaaaccagagaatcagg

SEQ ID NO: 3057 - DNA, 23 bp, Homo sapiens
  source 1..23: mol_type = other DNA
agtaggagaaccagagatgcagg

SEQ ID NO: 3058 - DNA, 23 bp, Homo sapiens
  source 1..23: mol_type = other DNA
ttgggggaaaccagtgagccagg

SEQ ID NO: 3059 - DNA, 23 bp, Homo sapiens
  source 1..23: mol_type = other DNA
aaaatgtaaaccagtgagtgtgg

SEQ ID NO: 3060 - DNA, 22 bp, Homo sapiens
  source 1..22: mol_type = other DNA
gaaaagaaaaccagtaatctgg

SEQ ID NO: 3061 - DNA, 23 bp, Homo sapiens
  source 1..23: mol_type = other DNA
tataggaaacacagtgactcagt

SEQ ID NO: 3062 - DNA, 22 bp, Homo sapiens
  source 1..22: mol_type = other DNA
gatagaaaaatcagtaatcagg

SEQ ID NO: 3063 - DNA, 23 bp, Homo sapiens
  source 1..23: mol_type = other DNA
aaaatgaaaatcagtgagtgggt

SEQ ID NO: 3064 - DNA, 23 bp, Homo sapiens
  source 1..23: mol_type = other DNA
gataggaaaaacagagagtgaga

SEQ ID NO: 3065 - DNA, 22 bp, Homo sapiens
  source 1..22: mol_type = other DNA
ccttggaaaaccagtggtgggg

SEQ ID NO: 3066 - DNA, 22 bp, Homo sapiens
  source 1..22: mol_type = other DNA
aataggataacaatgaatcagg

SEQ ID NO: 3067 - DNA, 22 bp, Homo sapiens
  source 1..22: mol_type = other DNA
tatagtataaccataagtctga

SEQ ID NO: 3068 - DNA, 22 bp, Homo sapiens
  source 1..22: mol_type = other DNA
tagtggaaaaccatgagtctag

SEQ ID NO: 3069 - DNA, 23 bp, Homo sapiens
  source 1..23: mol_type = other DNA
aataggaaaatcagtgggccagg

SEQ ID NO: 3070 - DNA, 23 bp, Homo sapiens
  source 1..23: mol_type = other DNA
ttaaggaataccaatgagcctgg

SEQ ID NO: 3071 - DNA, 23 bp, Homo sapiens
  source 1..23: mol_type = other DNA
tagaacaaaaccagtgatccaga

SEQ ID NO: 3072 - DNA, 23 bp, Homo sapiens
  source 1..23: mol_type = other DNA
tacagaaaaaccagagagtgggt

SEQ ID NO: 3073 - DNA, 23 bp, Homo sapiens
  source 1..23: mol_type = other DNA
tactggagaaccaatgagtagga

SEQ ID NO: 3074 - DNA, 23 bp, Homo sapiens
  source 1..23: mol_type = other DNA
ctctggaaaaccagtgagtcctt

SEQ ID NO: 3075 - DNA, 23 bp, Homo sapiens
  source 1..23: mol_type = other DNA
tattgataaaacagtgagttggc

SEQ ID NO: 3076 - DNA, 22 bp, Homo sapiens
  source 1..22: mol_type = other DNA
tttagattaccagtgagtttgg

SEQ ID NO: 3077 - DNA, 22 bp, Homo sapiens
  source 1..22: mol_type = other DNA
cataggacacaagtgagttggg

SEQ ID NO: 3078 - DNA, 22 bp, Homo sapiens
  source 1..22: mol_type = other DNA
cataggaaactcagtgaactgg

SEQ ID NO: 3079 - DNA, 22 bp, Homo sapiens
  source 1..22: mol_type = other DNA
tataggagaccagtgaagcaag

SEQ ID NO: 3080 - DNA, 22 bp, Homo sapiens
  source 1..22: mol_type = other DNA
tatggaaaaccagtgtgtggcc

SEQ ID NO: 3081 - DNA, 22 bp, Homo sapiens
  source 1..22: mol_type = other DNA
aatagtaatccagtgtgtctgg

SEQ ID NO: 3082 - DNA, 23 bp, Homo sapiens
  source 1..23: mol_type = other DNA
ctcaggaaaagcagtgactcagg

SEQ ID NO: 3083 - DNA, 22 bp, Homo sapiens
  source 1..22: mol_type = other DNA
gataggaaaaccatgaaggagg

SEQ ID NO: 3084 - DNA, 23 bp, Homo sapiens
  source 1..23: mol_type = other DNA
tgtaagaaaacctgagagcctgg

SEQ ID NO: 3085 - DNA, 23 bp, Homo sapiens
  source 1..23: mol_type = other DNA
tctttaaaaaccagtgagtcttt

SEQ ID NO: 3086 - DNA, 23 bp, Homo sapiens
  source 1..23: mol_type = other DNA
attaggaaaaccagttaggaggc

SEQ ID NO: 3087 - DNA, 23 bp, Homo sapiens
  source 1..23: mol_type = other DNA
tataggaaaaacagggactcgga

SEQ ID NO: 3088 - DNA, 22 bp, Homo sapiens
  source 1..22: mol_type = other DNA
tatggaaccccagtgagtctga

SEQ ID NO: 3089 - DNA, 22 bp, Homo sapiens
  source 1..22: mol_type = other DNA
catatgaaaatcaggaatcagg

SEQ ID NO: 3090 - DNA, 21 bp, Homo sapiens
  source 1..21: mol_type = other DNA
tataggaaagccacagtcagg

SEQ ID NO: 3091 - DNA, 22 bp, Homo sapiens
  source 1..22: mol_type = other DNA
gacaggaacaccaggagtcagg

SEQ ID NO: 3092 - DNA, 23 bp, Homo sapiens
  source 1..23: mol_type = other DNA
tggaggaaaactagagagttctg

SEQ ID NO: 3093 - DNA, 22 bp, Homo sapiens
  source 1..22: mol_type = other DNA
tcaaggaaaaacaggagtcagg

SEQ ID NO: 3094 - DNA, 23 bp, Homo sapiens
  source 1..23: mol_type = other DNA
ggcagggaaaccagtgagacagg

SEQ ID NO: 3095 - DNA, 23 bp, Homo sapiens
  source 1..23: mol_type = other DNA
tggagaaaaaccagtgaatgtgg

SEQ ID NO: 3096 - DNA, 23 bp, Homo sapiens
  source 1..23: mol_type = other DNA
gctactagaaccagtgagtcaga

SEQ ID NO: 3097 - DNA, 23 bp, Homo sapiens
  source 1..23: mol_type = other DNA
aatatgaaaaccagtgatggtag

SEQ ID NO: 3098 - DNA, 23 bp, Homo sapiens
  source 1..23: mol_type = other DNA
cctaagcaaaccagtgagatagg

SEQ ID NO: 3099 - DNA, 23 bp, Homo sapiens
  source 1..23: mol_type = other DNA
tataataagaccagtgagcatgg

SEQ ID NO: 3100 - DNA, 23 bp, Homo sapiens
  source 1..23: mol_type = other DNA
tatggaatatccagtgagtccga

SEQ ID NO: 3101 - DNA, 23 bp, Homo sapiens
  source 1..23: mol_type = other DNA
gagaggaaaaccagagactggag

SEQ ID NO: 3102 - DNA, 23 bp, Homo sapiens
  source 1..23: mol_type = other DNA
tagagaaacaacagtgagtccag

SEQ ID NO: 3103 - DNA, 23 bp, Homo sapiens
  source 1..23: mol_type = other DNA
gataggaagaccagtgtatctgc

SEQ ID NO: 3104 - DNA, 23 bp, Homo sapiens
  source 1..23: mol_type = other DNA
ggtagcaaaactagtaagcctgg

SEQ ID NO: 3105 - DNA, 23 bp, Homo sapiens
  source 1..23: mol_type = other DNA
tataggcaacacagtgaatatgg

SEQ ID NO: 3106 - DNA, 23 bp, Homo sapiens
  source 1..23: mol_type = other DNA
tataagcaaaccagggagtgagc

SEQ ID NO: 3107 - DNA, 22 bp, Homo sapiens
  source 1..22: mol_type = other DNA
cataggaaaacagtgagaaagt

SEQ ID NO: 3108 - DNA, 22 bp, Homo sapiens
  source 1..22: mol_type = other DNA
tataagaaaaccagtagtcact

SEQ ID NO: 3109 - DNA, 21 bp, Homo sapiens
  source 1..21: mol_type = other DNA
tcaaggaaaaccagtgacagt

SEQ ID NO: 3110 - DNA, 22 bp, Homo sapiens
  source 1..22: mol_type = other DNA
tacaataaaaccagggatctgg

SEQ ID NO: 3111 - DNA, 23 bp, Homo sapiens
  source 1..23: mol_type = other DNA
gatgggaaaaactgagagtgggg

SEQ ID NO: 3112 - DNA, 23 bp, Homo sapiens
  source 1..23: mol_type = other DNA
tagagaaaaaccagttaataggc

SEQ ID NO: 3113 - DNA, 23 bp, Homo sapiens
  source 1..23: mol_type = other DNA
agtacggaaaccaggtagtctgg

SEQ ID NO: 3114 - DNA, 21 bp, Homo sapiens
  source 1..21: mol_type = other DNA
taaaggaaaacctgagactgg

SEQ ID NO: 3115 - DNA, 22 bp, Homo sapiens
  source 1..22: mol_type = other DNA
gataggaaacccagaggccggg

SEQ ID NO: 3116 - DNA, 23 bp, Homo sapiens
  source 1..23: mol_type = other DNA
cataggaaatccagtgaaagaga

SEQ ID NO: 3117 - DNA, 23 bp, Homo sapiens
  source 1..23: mol_type = other DNA
tataggaaaaacagtaatagagt

SEQ ID NO: 3118 - DNA, 23 bp, Homo sapiens
  source 1..23: mol_type = other DNA
aatagaaaaaccagtaggtatga

SEQ ID NO: 3119 - DNA, 23 bp, Homo sapiens
  source 1..23: mol_type = other DNA
tatagaaaaaccagagtcaatgg

SEQ ID NO: 3120 - DNA, 23 bp, Homo sapiens
  source 1..23: mol_type = other DNA
gttggaaaaagcagggagtcagg

SEQ ID NO: 3121 - DNA, 23 bp, Homo sapiens
  source 1..23: mol_type = other DNA
aaaaggaaaaccactgagaaggc

SEQ ID NO: 3122 - DNA, 23 bp, Homo sapiens
  source 1..23: mol_type = other DNA
aatatgtaaactaatgagtgtgg

SEQ ID NO: 3123 - DNA, 23 bp, Homo sapiens
  source 1..23: mol_type = other DNA
catgggtaacccagtgagtctgg

SEQ ID NO: 3124 - DNA, 23 bp, Homo sapiens
  source 1..23: mol_type = other DNA
tgtaggaaggtcagtgtgtaggg

SEQ ID NO: 3125 - DNA, 22 bp, Homo sapiens
  source 1..22: mol_type = other DNA
cataggaaaagcagtattcgtg

SEQ ID NO: 3126 - DNA, 22 bp, Homo sapiens
  source 1..22: mol_type = other DNA
aataggaaaaccagttatcaca

SEQ ID NO: 3127 - DNA, 23 bp, Homo sapiens
  source 1..23: mol_type = other DNA
cgtggaaaaaccagtgagaatgg

SEQ ID NO: 3128 - DNA, 23 bp, Homo sapiens
  source 1..23: mol_type = other DNA
taaaggaaaacaagtgaatttaa

SEQ ID NO: 3129 - DNA, 24 bp, Homo sapiens
  source 1..24: mol_type = other DNA
taaaggatgaccagtggagtcaag

SEQ ID NO: 3130 - DNA, 22 bp, Homo sapiens
  source 1..22: mol_type = other DNA
tatgggaaaacagtgtgttggt

SEQ ID NO: 3131 - DNA, 21 bp, Homo sapiens
  source 1..21: mol_type = other DNA
taaaggaaaacctgaaactgg

SEQ ID NO: 3132 - DNA, 22 bp, Homo sapiens
  source 1..22: mol_type = other DNA
tctgggagaaccaggtgtcggg

SEQ ID NO: 3133 - DNA, 23 bp, Homo sapiens
  source 1..23: mol_type = other DNA
taaaggaaaaccagtagagctcg

SEQ ID NO: 3134 - DNA, 23 bp, Homo sapiens
  source 1..23: mol_type = other DNA
tatccataatccaatgagtcagg

SEQ ID NO: 3135 - DNA, 23 bp, Homo sapiens
  source 1..23: mol_type = other DNA
cagaggaaaaccagtgtggcgat

SEQ ID NO: 3136 - DNA, 24 bp, Homo sapiens
  source 1..24: mol_type = other DNA
tacagtgaaaactagtgactcagg

SEQ ID NO: 3137 - DNA, 25 bp, Homo sapiens
  source 1..25: mol_type = other DNA
tataggtgtaaaccagtgtgcctag

SEQ ID NO: 3138 - DNA, 23 bp, Homo sapiens
  source 1..23: mol_type = other DNA
tataggagaaacagtgaatagga

SEQ ID NO: 3139 - DNA, 23 bp, Homo sapiens
  source 1..23: mol_type = other DNA
tggaagaaaaccaatgagttggt

SEQ ID NO: 3140 - DNA, 23 bp, Homo sapiens
  source 1..23: mol_type = other DNA
aacaagaaaaccagtgatctggg

SEQ ID NO: 3141 - DNA, 23 bp, Homo sapiens
  source 1..23: mol_type = other DNA
gacaagaaaaccagtgagtgtgg

SEQ ID NO: 3142 - DNA, 23 bp, Homo sapiens
  source 1..23: mol_type = other DNA
tgggggaaaaccagtgagtcagg

SEQ ID NO: 3143 - DNA, 22 bp, Homo sapiens
  source 1..22: mol_type = other DNA
tatagcataccaatgagtctgg

SEQ ID NO: 3144 - DNA, 22 bp, Homo sapiens
  source 1..22: mol_type = other DNA
aagaagaaaaccagtggccagg

SEQ ID NO: 3145 - DNA, 22 bp, Homo sapiens
  source 1..22: mol_type = other DNA
gtggggaaaaccagtggtctgg

SEQ ID NO: 3146 - DNA, 22 bp, Homo sapiens
  source 1..22: mol_type = other DNA
tagaagtaaaccagaagtcagg

SEQ ID NO: 3147 - DNA, 22 bp, Homo sapiens
  source 1..22: mol_type = other DNA
tgcaggaaatccagtggtctgg

SEQ ID NO: 3148 - DNA, 24 bp, Homo sapiens
  source 1..24: mol_type = other DNA
tatacataaaaccagtgagaaggg

SEQ ID NO: 3149 - DNA, 23 bp, Homo sapiens
  source 1..23: mol_type = other DNA
agaaggaaaaccagggagtcaag

SEQ ID NO: 3150 - DNA, 23 bp, Homo sapiens
  source 1..23: mol_type = other DNA
agtttgaaaaccagtgagcctgg

SEQ ID NO: 3151 - DNA, 23 bp, Homo sapiens
  source 1..23: mol_type = other DNA
gacattaaaaccagtgagtatgg

SEQ ID NO: 3152 - DNA, 23 bp, Homo sapiens
  source 1..23: mol_type = other DNA
tataggttatccagtgaatctag

SEQ ID NO: 3153 - DNA, 23 bp, Homo sapiens
  source 1..23: mol_type = other DNA
tatcagaaaactagtgagtctgg

SEQ ID NO: 3154 - DNA, 24 bp, Homo sapiens
  source 1..24: mol_type = other DNA
aggaggaaaaccagaagagtctgg

SEQ ID NO: 3155 - DNA, 22 bp, Homo sapiens
  source 1..22: mol_type = other DNA
tgtataaaaaccactgatcagg

SEQ ID NO: 3156 - DNA, 22 bp, Homo sapiens
  source 1..22: mol_type = other DNA
tagaggaaaacagtgaaacagg

SEQ ID NO: 3157 - DNA, 22 bp, Homo sapiens
  source 1..22: mol_type = other DNA
gaaaggaaaaccatgaataagg

SEQ ID NO: 3158 - DNA, 23 bp, Homo sapiens
  source 1..23: mol_type = other DNA
tattaggaaagcagtgagttgga

SEQ ID NO: 3159 - DNA, 22 bp, Homo sapiens
  source 1..22: mol_type = other DNA
tgcaataaaaccaggagtctgg

SEQ ID NO: 3160 - DNA, 23 bp, Homo sapiens
  source 1..23: mol_type = other DNA
agtgagtaaaccagagagtctgg

SEQ ID NO: 3161 - DNA, 23 bp, Homo sapiens
  source 1..23: mol_type = other DNA
tgtagggagaccagtgaggggga

SEQ ID NO: 3162 - DNA, 23 bp, Homo sapiens
  source 1..23: mol_type = other DNA
atcatgaaaaccaatgattctgg

SEQ ID NO: 3163 - DNA, 23 bp, Homo sapiens
  source 1..23: mol_type = other DNA
tcctggtaaaccagtgagtcata

SEQ ID NO: 3164 - DNA, 22 bp, Homo sapiens
  source 1..22: mol_type = other DNA
tgtagagaaccagtgaatgagg

SEQ ID NO: 3165 - DNA, 23 bp, Homo sapiens
  source 1..23: mol_type = other DNA
aatacataaaccagtgagcatgg

SEQ ID NO: 3166 - DNA, 23 bp, Homo sapiens
  source 1..23: mol_type = other DNA
gacaagaaaaccagcgagtgtgg

SEQ ID NO: 3167 - DNA, 22 bp, Homo sapiens
  source 1..22: mol_type = other DNA
aataggagaaccaggagtcatg

SEQ ID NO: 3168 - DNA, 22 bp, Homo sapiens
  source 1..22: mol_type = other DNA
tataggaaagtcaggagttagg

SEQ ID NO: 3169 - DNA, 21 bp, Homo sapiens
  source 1..21: mol_type = other DNA
cttaggaaaatcagagtctgg

SEQ ID NO: 3170 - DNA, 21 bp, Homo sapiens
  source 1..21: mol_type = other DNA
tgtaagaaaaccagaggctgg

SEQ ID NO: 3171 - DNA, 23 bp, Homo sapiens
  source 1..23: mol_type = other DNA
aatagaaaaaacagtgaagttgg

SEQ ID NO: 3172 - DNA, 23 bp, Homo sapiens
  source 1..23: mol_type = other DNA
tatagtaaaacaagtgagaaatg

SEQ ID NO: 3173 - DNA, 23 bp, Homo sapiens
  source 1..23: mol_type = other DNA
gagaccaaaaccagtgagtaggt

SEQ ID NO: 3174 - DNA, 23 bp, Homo sapiens
  source 1..23: mol_type = other DNA
taggggagaaccagtgagtcagg

SEQ ID NO: 3175 - DNA, 24 bp, Homo sapiens
  source 1..24: mol_type = other DNA
tgtggacaaaaccagtgagtgtgg

SEQ ID NO: 3176 - DNA, 22 bp, Homo sapiens
  source 1..22: mol_type = other DNA
ggcaggaaaaccacgagtctgg

SEQ ID NO: 3177 - DNA, 23 bp, Homo sapiens
  source 1..23: mol_type = other DNA
tataggaataccagtgagttttg

SEQ ID NO: 3178 - DNA, 23 bp, Homo sapiens
  source 1..23: mol_type = other DNA
tagtggaaaaccagtgagagatt

SEQ ID NO: 3179 - DNA, 22 bp, Homo sapiens
  source 1..22: mol_type = other DNA
gagagggaagccatgagtctgg

SEQ ID NO: 3180 - DNA, 23 bp, Homo sapiens
  source 1..23: mol_type = other DNA
tttaggaacagctgtgagtatgt

SEQ ID NO: 3181 - DNA, 23 bp, Homo sapiens
  source 1..23: mol_type = other DNA
gaaaggaaaaccgctgagtacgc

SEQ ID NO: 3182 - DNA, 23 bp, Homo sapiens
  source 1..23: mol_type = other DNA
taaaggagaaccattgattcctc

SEQ ID NO: 3183 - DNA, 23 bp, Homo sapiens
  source 1..23: mol_type = other DNA
aatataataaacagtgagcctgg

SEQ ID NO: 3184 - DNA, 23 bp, Homo sapiens
  source 1..23: mol_type = other DNA
tataagaacaccagtaagattgg

SEQ ID NO: 3185 - DNA, 23 bp, Homo sapiens
  source 1..23: mol_type = other DNA
tataggagaaccaaagcatcagg

SEQ ID NO: 3186 - DNA, 23 bp, Homo sapiens
  source 1..23: mol_type = other DNA
cgtaggaaaacccaggactcagg

SEQ ID NO: 3187 - DNA, 23 bp, Homo sapiens
  source 1..23: mol_type = other DNA
aataggaaaatcaatgatacgag

SEQ ID NO: 3188 - DNA, 23 bp, Homo sapiens
  source 1..23: mol_type = other DNA
tataggaaagctattgagtttta

SEQ ID NO: 3189 - DNA, 23 bp, Homo sapiens
  source 1..23: mol_type = other DNA
aaaaggaaaaccagttggtagga

SEQ ID NO: 3190 - DNA, 23 bp, Homo sapiens
  source 1..23: mol_type = other DNA
tgtgctgataccagtgagtctgg

SEQ ID NO: 3191 - DNA, 23 bp, Homo sapiens
  source 1..23: mol_type = other DNA
aataagtaaaccagggattcgtg

SEQ ID NO: 3192 - DNA, 22 bp, Homo sapiens
  source 1..22: mol_type = other DNA
tttaggaaaaccatgtttaggg

SEQ ID NO: 3193 - DNA, 21 bp, Homo sapiens
  source 1..21: mol_type = other DNA
tttaggaaaaagtgattcagg

SEQ ID NO: 3194 - DNA, 23 bp, Homo sapiens
  source 1..23: mol_type = other DNA
tataggaatgcctgtgatttctg

SEQ ID NO: 3195 - DNA, 23 bp, Homo sapiens
  source 1..23: mol_type = other DNA
tatagcaataccactaagtatga

SEQ ID NO: 3196 - DNA, 23 bp, Homo sapiens
  source 1..23: mol_type = other DNA
tacaagcaaaacagtcagtccag

SEQ ID NO: 3197 - DNA, 23 bp, Homo sapiens
  source 1..23: mol_type = other DNA
tatatgaaaaccacagaggcact

SEQ ID NO: 3198 - DNA, 21 bp, Homo sapiens
  source 1..21: mol_type = other DNA
tataggaaaccctgtgacatg

SEQ ID NO: 3199 - DNA, 22 bp, Homo sapiens
  source 1..22: mol_type = other DNA
tataggaaaaccatgaggaata

SEQ ID NO: 3200 - DNA, 22 bp, Homo sapiens
  source 1..22: mol_type = other DNA
cataagaaaaccatgggccggg

SEQ ID NO: 3201 - DNA, 23 bp, Homo sapiens
  source 1..23: mol_type = other DNA
tataggaaaactagctagtaagg

SEQ ID NO: 3202 - DNA, 22 bp, Homo sapiens
  source 1..22: mol_type = other DNA
tagaggaaaaacagtagacagt

SEQ ID NO: 3203 - DNA, 22 bp, Homo sapiens
  source 1..22: mol_type = other DNA
tataagaaaccagtgagtcaga

SEQ ID NO: 3204 - DNA, 23 bp, Homo sapiens
  source 1..23: mol_type = other DNA
tataggagaaacagtgagtagga

SEQ ID NO: 3205 - DNA, 23 bp, Homo sapiens
  source 1..23: mol_type = other DNA
ttcaggaaaaccagtgagtcaca

SEQ ID NO: 3206 - DNA, 22 bp, Homo sapiens
  source 1..22: mol_type = other DNA
atgaggaaatccagtggtccgg

SEQ ID NO: 3207 - DNA, 22 bp, Homo sapiens
  source 1..22: mol_type = other DNA
tatagaaaaacagtaattctgg

SEQ ID NO: 3208 - DNA, 22 bp, Homo sapiens
  source 1..22: mol_type = other DNA
tatataaaaccactgagtcaag

SEQ ID NO: 3209 - DNA, 22 bp, Homo sapiens
  source 1..22: mol_type = other DNA
tacaggaaaaccagtggtctga

SEQ ID NO: 3210 - DNA, 23 bp, Homo sapiens
  source 1..23: mol_type = other DNA
tataagaaaccaagagagtctgg

SEQ ID NO: 3211 - DNA, 23 bp, Homo sapiens
  source 1..23: mol_type = other DNA
tataggaagacagttgagtctgg

SEQ ID NO: 3212 - DNA, 22 bp, Homo sapiens
  source 1..22: mol_type = other DNA
aacgtgaaaaccagtgagcagg

SEQ ID NO: 3213 - DNA, 23 bp, Homo sapiens
  source 1..23: mol_type = other DNA
cagggtaaaaccagagagtcaag

SEQ ID NO: 3214 - DNA, 23 bp, Homo sapiens
  source 1..23: mol_type = other DNA
cagaggaaaaacagtaagtaggt

SEQ ID NO: 3215 - DNA, 22 bp, Homo sapiens
  source 1..22: mol_type = other DNA
tataggaaacacagtggacagg

SEQ ID NO: 3216 - DNA, 23 bp, Homo sapiens
  source 1..23: mol_type = other DNA
aacaggaaaaccactgggtcagg

SEQ ID NO: 3217 - DNA, 23 bp, Homo sapiens
  source 1..23: mol_type = other DNA
attaggtcaaccagtgaggttgg

SEQ ID NO: 3218 - DNA, 23 bp, Homo sapiens
  source 1..23: mol_type = other DNA
tataagaataccagtaatatggg

SEQ ID NO: 3219 - DNA, 23 bp, Homo sapiens
  source 1..23: mol_type = other DNA
ttgaggagaaccagtgagtctgg

SEQ ID NO: 3220 - DNA, 22 bp, Homo sapiens
  source 1..22: mol_type = other DNA
tttctggaaaccatgagtcagg

SEQ ID NO: 3221 - DNA, 23 bp, Homo sapiens
  source 1..23: mol_type = other DNA
aataggtaaaccaatgagcatgg

SEQ ID NO: 3222 - DNA, 23 bp, Homo sapiens
  source 1..23: mol_type = other DNA
gactgtaaaaccagtaagtaggg

SEQ ID NO: 3223 - DNA, 22 bp, Homo sapiens
  source 1..22: mol_type = other DNA
gttaagaaaacagtgagtctag

SEQ ID NO: 3224 - DNA, 23 bp, Homo sapiens
  source 1..23: mol_type = other DNA
gaaaggaaaatcagtgggtctgg

SEQ ID NO: 3225 - DNA, 22 bp, Homo sapiens
  source 1..22: mol_type = other DNA
catacaaaaccagagagtgggg

SEQ ID NO: 3226 - DNA, 22 bp, Homo sapiens
  source 1..22: mol_type = other DNA
tgcaggaaacccatgagtcagg

SEQ ID NO: 3227 - DNA, 23 bp, Homo sapiens
  source 1..23: mol_type = other DNA
tataaaaataccagtgagtaaag

SEQ ID NO: 3228 - DNA, 22 bp, Homo sapiens
  source 1..22: mol_type = other DNA
attaggaaatgcagtgagcagg

SEQ ID NO: 3229 - DNA, 22 bp, Homo sapiens
  source 1..22: mol_type = other DNA
tatagagaaacagtaattctgg

SEQ ID NO: 3230 - DNA, 22 bp, Homo sapiens
  source 1..22: mol_type = other DNA
tataggacaccagtgattgttg

SEQ ID NO: 3231 - DNA, 24 bp, Homo sapiens
  source 1..24: mol_type = other DNA
gaaaggataaccagatgagtctgg

SEQ ID NO: 3232 - DNA, 23 bp, Homo sapiens
  source 1..23: mol_type = other DNA
tggaggaaaaacagggagtaggg

SEQ ID NO: 3233 - DNA, 22 bp, Homo sapiens
  source 1..22: mol_type = other DNA
tatagaaatacagtgagttgtg

SEQ ID NO: 3234 - DNA, 23 bp, Homo sapiens
  source 1..23: mol_type = other DNA
tatagtgaaaccaggtagtgggt

SEQ ID NO: 3235 - DNA, 22 bp, Homo sapiens
  source 1..22: mol_type = other DNA
tatagaaaaccactgaatttgg

SEQ ID NO: 3236 - DNA, 22 bp, Homo sapiens
  source 1..22: mol_type = other DNA
tatttgaaaaccatgagtcaga

SEQ ID NO: 3237 - DNA, 23 bp, Homo sapiens
  source 1..23: mol_type = other DNA
tggagaaaaaccagagagactgg

SEQ ID NO: 3238 - DNA, 23 bp, Homo sapiens
  source 1..23: mol_type = other DNA
atgaggaaaaccagtgaggagag

SEQ ID NO: 3239 - DNA, 22 bp, Homo sapiens
  source 1..22: mol_type = other DNA
aatagggaaacaatgagtttgg

SEQ ID NO: 3240 - DNA, 23 bp, Homo sapiens
  source 1..23: mol_type = other DNA
tagtaaagaaccagtgactcagg

SEQ ID NO: 3241 - DNA, 23 bp, Homo sapiens
  source 1..23: mol_type = other DNA
tatgactaaaccagtgggtacgg

SEQ ID NO: 3242 - DNA, 22 bp, Homo sapiens
  source 1..22: mol_type = other DNA
tgtagaaaaaacatgagttagg

SEQ ID NO: 3243 - DNA, 23 bp, Homo sapiens
  source 1..23: mol_type = other DNA
attaggaagacaagtgagtttgg

SEQ ID NO: 3244 - DNA, 23 bp, Homo sapiens
  source 1..23: mol_type = other DNA
gagattcaaaccagagagtcggg

SEQ ID NO: 3245 - DNA, 23 bp, Homo sapiens
  source 1..23: mol_type = other DNA
aaagggaaagccagagagtcagg

SEQ ID NO: 3246 - DNA, 23 bp, Homo sapiens
  source 1..23: mol_type = other DNA
ggtagggaagccagtgagccagg

SEQ ID NO: 3247 - DNA, 23 bp, Homo sapiens
  source 1..23: mol_type = other DNA
actctgaaaaccagtgaggcagg

SEQ ID NO: 3248 - DNA, 22 bp, Homo sapiens
  source 1..22: mol_type = other DNA
taaagtagtaccagtgagctgg

SEQ ID NO: 3249 - DNA, 23 bp, Homo sapiens
  source 1..23: mol_type = other DNA
tatggggaaaaccaagagtctgg

SEQ ID NO: 3250 - DNA, 22 bp, Homo sapiens
  source 1..22: mol_type = other DNA
aagaggaagccagagagtcagg

SEQ ID NO: 3251 - DNA, 23 bp, Homo sapiens
  source 1..23: mol_type = other DNA
aaaaaggaaaccattgagttggg

SEQ ID NO: 3252 - DNA, 22 bp, Homo sapiens
  source 1..22: mol_type = other DNA
aatactaaaaccaatagtcagg

SEQ ID NO: 3253 - DNA, 23 bp, Homo sapiens
  source 1..23: mol_type = other DNA
tggagtgtaaccattgagtctgg

SEQ ID NO: 3254 - DNA, 24 bp, Homo sapiens
  source 1..24: mol_type = other DNA
aaaagtataaaccaatgagtctgg

SEQ ID NO: 3255 - DNA, 21 bp, Homo sapiens
  source 1..21: mol_type = other DNA
tacaggtaccagtgagtcatg

SEQ ID NO: 3256 - DNA, 22 bp, Homo sapiens
  source 1..22: mol_type = other DNA
tgtggaagaccagtgagttgtg

SEQ ID NO: 3257 - DNA, 23 bp, Homo sapiens
  source 1..23: mol_type = other DNA
gatgggaaaaccagtgcgtttat

SEQ ID NO: 3258 - DNA, 22 bp, Homo sapiens
  source 1..22: mol_type = other DNA
gatagggaaaccagttagcaga

SEQ ID NO: 3259 - DNA, 23 bp, Homo sapiens
  source 1..23: mol_type = other DNA
tataggaatattagtgagtttga

SEQ ID NO: 3260 - DNA, 24 bp, Homo sapiens
  source 1..24: mol_type = other DNA
gatacggataaccagtgagtcaac

SEQ ID NO: 3261 - DNA, 22 bp, Homo sapiens
  source 1..22: mol_type = other DNA
aatcggaaaatcagtagtcatg

SEQ ID NO: 3262 - DNA, 22 bp, Homo sapiens
  source 1..22: mol_type = other DNA
tacaggataccagtgatactgg

SEQ ID NO: 3263 - DNA, 23 bp, Homo sapiens
  source 1..23: mol_type = other DNA
tatagagataccagtgtgtttgt

SEQ ID NO: 3264 - DNA, 22 bp, Homo sapiens
  source 1..22: mol_type = other DNA
tatagcaagaccttgagtcctg

SEQ ID NO: 3265 - DNA, 23 bp, Homo sapiens
  source 1..23: mol_type = other DNA
tacaggaaggccagagagacagt

SEQ ID NO: 3266 - DNA, 23 bp, Homo sapiens
  source 1..23: mol_type = other DNA
aatacgaaaaacagtcaggcgtg

SEQ ID NO: 3267 - DNA, 23 bp, Homo sapiens
  source 1..23: mol_type = other DNA
ctttgaaaaagcaatgagtctgg

SEQ ID NO: 3268 - DNA, 23 bp, Homo sapiens
  source 1..23: mol_type = other DNA
tataggaaaaactgtggtcctgt

SEQ ID NO: 3269 - DNA, 23 bp, Homo sapiens
  source 1..23: mol_type = other DNA
tgtgagcattccagtgagtcagg

SEQ ID NO: 3270 - DNA, 23 bp, Homo sapiens
  source 1..23: mol_type = other DNA
tttagaaagacctgagagtccag

SEQ ID NO: 3271 - DNA, 23 bp, Homo sapiens
  source 1..23: mol_type = other DNA
tataggagaaacagtggaccagg

SEQ ID NO: 3272 - DNA, 22 bp, Homo sapiens
  source 1..22: mol_type = other DNA
gataggaaaaccaagagtatgt

SEQ ID NO: 3273 - DNA, 22 bp, Homo sapiens
  source 1..22: mol_type = other DNA
tatagcaaaaccagtattaaga

SEQ ID NO: 3274 - DNA, 22 bp, Homo sapiens
  source 1..22: mol_type = other DNA
tataggaaaaaaagtagttaag

SEQ ID NO: 3275 - DNA, 23 bp, Homo sapiens
  source 1..23: mol_type = other DNA
aataggaaatccaggcagtggga

SEQ ID NO: 3276 - DNA, 23 bp, Homo sapiens
  source 1..23: mol_type = other DNA
tgatggaaaagcagagagtcatg

SEQ ID NO: 3277 - DNA, 23 bp, Homo sapiens
  source 1..23: mol_type = other DNA
aataagcaaataaatgagtctgg

SEQ ID NO: 3278 - DNA, 23 bp, Homo sapiens
  source 1..23: mol_type = other DNA
taggataaaagcagtgagtccgg

SEQ ID NO: 3279 - DNA, 23 bp, Homo sapiens
  source 1..23: mol_type = other DNA
gataggaaagccagggagagagg

SEQ ID NO: 3280 - DNA, 23 bp, Homo sapiens
  source 1..23: mol_type = other DNA
tgcaataaaaccagtgagtcgtc

SEQ ID NO: 3281 - DNA, 23 bp, Homo sapiens
  source 1..23: mol_type = other DNA
tatatgcaaaacagtgagccaag

SEQ ID NO: 3282 - DNA, 23 bp, Homo sapiens
  source 1..23: mol_type = other DNA
tggaagaaagccagtgtgcctgg

SEQ ID NO: 3283 - DNA, 21 bp, Homo sapiens
  source 1..21: mol_type = other DNA
tataagcaaacctaagtcagg

SEQ ID NO: 3284 - DNA, 22 bp, Homo sapiens
  source 1..22: mol_type = other DNA
caaaggaaaaccgagaatcagg

SEQ ID NO: 3285 - DNA, 22 bp, Homo sapiens
  source 1..22: mol_type = other DNA
tacagtagaaccatgaggcagg

SEQ ID NO: 3286 - DNA, 23 bp, Homo sapiens
  source 1..23: mol_type = other DNA
tacaggaaaaaaagtgaatggtg

SEQ ID NO: 3287 - DNA, 23 bp, Homo sapiens
  source 1..23: mol_type = other DNA
aatagtgagaccagtgtgtctgg

SEQ ID NO: 3288 - DNA, 23 bp, Homo sapiens
  source 1..23: mol_type = other DNA
aagaggaaaaccagtgtctgtgt

SEQ ID NO: 3289 - DNA, 23 bp, Homo sapiens
  source 1..23: mol_type = other DNA
aaaatgtaaaccagtaagcccgg

SEQ ID NO: 3290 - DNA, 24 bp, Homo sapiens
  source 1..24: mol_type = other DNA
tgtaggaagaaccagtggatcggg

SEQ ID NO: 3291 - DNA, 22 bp, Homo sapiens
  source 1..22: mol_type = other DNA
agtaggagaaccatgagttggg

SEQ ID NO: 3292 - DNA, 23 bp, Homo sapiens
  source 1..23: mol_type = other DNA
tataaggacaccagtgagactgg

SEQ ID NO: 3293 - DNA, 23 bp, Homo sapiens
  source 1..23: mol_type = other DNA
aataagaaaaccagtttgtgggc

SEQ ID NO: 3294 - DNA, 22 bp, Homo sapiens
  source 1..22: mol_type = other DNA
aataggagaccagttagtctgg

SEQ ID NO: 3295 - DNA, 23 bp, Homo sapiens
  source 1..23: mol_type = other DNA
tgggggaaaaccagtgagtagag

SEQ ID NO: 3296 - DNA, 22 bp, Homo sapiens
  source 1..22: mol_type = other DNA
catataaaaccaatgagtcaag

SEQ ID NO: 3297 - DNA, 22 bp, Homo sapiens
  source 1..22: mol_type = other DNA
gatgggaaaaccaatggtcggg

SEQ ID NO: 3298 - DNA, 24 bp, Homo sapiens
  source 1..24: mol_type = other DNA
aggaggaaaaccaggagagtctgg

SEQ ID NO: 3299 - DNA, 22 bp, Homo sapiens
  source 1..22: mol_type = other DNA
tatacataaaccagtgatatgg

SEQ ID NO: 3300 - DNA, 23 bp, Homo sapiens
  source 1..23: mol_type = other DNA
attaggataaccagtgtgtttgg

SEQ ID NO: 3301 - DNA, 22 bp, Homo sapiens
  source 1..22: mol_type = other DNA
tgtgaaaaaccagtgagtaggt

SEQ ID NO: 3302 - DNA, 23 bp, Homo sapiens
  source 1..23: mol_type = other DNA
tgagtggaaaccagtgagtcggc

SEQ ID NO: 3303 - DNA, 23 bp, Homo sapiens
  source 1..23: mol_type = other DNA
aaaaggaaaaccagtgaattaag

SEQ ID NO: 3304 - DNA, 23 bp, Homo sapiens
  source 1..23: mol_type = other DNA
gagataaaaaccagtgagtcaaa

SEQ ID NO: 3305 - DNA, 23 bp, Homo sapiens
  source 1..23: mol_type = other DNA
gatagaaaaaccagtgaaattgg

SEQ ID NO: 3306 - DNA, 23 bp, Homo sapiens
  source 1..23: mol_type = other DNA
aaatggaaaaccattgagtaggc

SEQ ID NO: 3307 - DNA, 23 bp, Homo sapiens
  source 1..23: mol_type = other DNA
caaaggaaaaccagagagtggat

SEQ ID NO: 3308 - DNA, 22 bp, Homo sapiens
  source 1..22: mol_type = other DNA
cattggaaaaccatgtgtcagg

SEQ ID NO: 3309 - DNA, 23 bp, Homo sapiens
  source 1..23: mol_type = other DNA
tctaagaaaatcagtgagcaggg

SEQ ID NO: 3310 - DNA, 23 bp, Homo sapiens
  source 1..23: mol_type = other DNA
tataggaaaatcagtggctatgg

SEQ ID NO: 3311 - DNA, 22 bp, Homo sapiens
  source 1..22: mol_type = other DNA
taaggaaaaccagggaatgggc

SEQ ID NO: 3312 - DNA, 22 bp, Homo sapiens
  source 1..22: mol_type = other DNA
taaggaaaaccagagaatgggt

SEQ ID NO: 3313 - DNA, 24 bp, Homo sapiens
  source 1..24: mol_type = other DNA
aacagagaaaaccagtgactgggg

SEQ ID NO: 3314 - DNA, 22 bp, Homo sapiens
  source 1..22: mol_type = other DNA
aataagagaatcagtggtcagg

SEQ ID NO: 3315 - DNA, 23 bp, Homo sapiens
  source 1..23: mol_type = other DNA
tgtaggtaaacctgtgacttggg

SEQ ID NO: 3316 - DNA, 23 bp, Homo sapiens
  source 1..23: mol_type = other DNA
tctgggttaaccagtgagtgggt

SEQ ID NO: 3317 - DNA, 23 bp, Homo sapiens
  source 1..23: mol_type = other DNA
ggatggagaaccactgagtctgg

SEQ ID NO: 3318 - DNA, 23 bp, Homo sapiens
  source 1..23: mol_type = other DNA
ggaagggaaaacagtgagtcagg

SEQ ID NO: 3319 - DNA, 22 bp, Homo sapiens
  source 1..22: mol_type = other DNA
actaggaaaaccagtactgcgg

SEQ ID NO: 3320 - DNA, 23 bp, Homo sapiens
  source 1..23: mol_type = other DNA
tgtagaaaaaccagtaaccccag

SEQ ID NO: 3321 - DNA, 22 bp, Homo sapiens
  source 1..22: mol_type = other DNA
aataggaaagacagtgatctgt

SEQ ID NO: 3322 - DNA, 23 bp, Homo sapiens
  source 1..23: mol_type = other DNA
gctggtagaaccactgagtctgg

SEQ ID NO: 3323 - DNA, 23 bp, Homo sapiens
  source 1..23: mol_type = other DNA
catctgaaaaccagagagttgga

SEQ ID NO: 3324 - DNA, 23 bp, Homo sapiens
  source 1..23: mol_type = other DNA
tgttgtgaaaccagagagtatgg

SEQ ID NO: 3325 - DNA, 23 bp, Homo sapiens
  source 1..23: mol_type = other DNA
gcaaggaaaacaaatgagtcctg

SEQ ID NO: 3326 - DNA, 23 bp, Homo sapiens
  source 1..23: mol_type = other DNA
tatagggacaccggtgagcttgg

SEQ ID NO: 3327 - DNA, 23 bp, Homo sapiens
  source 1..23: mol_type = other DNA
tataggaaaaccaaggagctcct

SEQ ID NO: 3328 - DNA, 24 bp, Homo sapiens
  source 1..24: mol_type = other DNA
gaggggaaagaccagagagtcggg

SEQ ID NO: 3329 - DNA, 22 bp, Homo sapiens
  source 1..22: mol_type = other DNA
taaaggaaaaccctgagtagga

SEQ ID NO: 3330 - DNA, 22 bp, Homo sapiens
  source 1..22: mol_type = other DNA
tctgtgaataccaggagtccgg

SEQ ID NO: 3331 - DNA, 22 bp, Homo sapiens
  source 1..22: mol_type = other DNA
tataggcagaccagtggtcctt

SEQ ID NO: 3332 - DNA, 23 bp, Homo sapiens
  source 1..23: mol_type = other DNA
cacaggagaaccaatgagcctgg

SEQ ID NO: 3333 - DNA, 23 bp, Homo sapiens
  source 1..23: mol_type = other DNA
gctaggaaaacagctgagcctgg

SEQ ID NO: 3334 - DNA, 22 bp, Homo sapiens
  source 1..22: mol_type = other DNA
tccaggaaaaccaggagcaggg

SEQ ID NO: 3335 - DNA, 22 bp, Homo sapiens
  source 1..22: mol_type = other DNA
gatagaaacacagtgagcctgg

SEQ ID NO: 3336 - DNA, 23 bp, Homo sapiens
  source 1..23: mol_type = other DNA
cagaggcacaccagtgagtcagg

SEQ ID NO: 3337 - DNA, 23 bp, Homo sapiens
  source 1..23: mol_type = other DNA
ggaagggaaaacagcgagtcagg

SEQ ID NO: 3338 - DNA, 23 bp, Homo sapiens
  source 1..23: mol_type = other DNA
aataggtaaaccagtaagtacta

SEQ ID NO: 3339 - DNA, 23 bp, Homo sapiens
  source 1..23: mol_type = other DNA
aataggaaaaccagagaggaagc

SEQ ID NO: 3340 - DNA, 22 bp, Homo sapiens
  source 1..22: mol_type = other DNA
tatagaataaccagtagtagag

SEQ ID NO: 3341 - DNA, 22 bp, Homo sapiens
  source 1..22: mol_type = other DNA
gaaataaaaaccgtgagtcagg

SEQ ID NO: 3342 - DNA, 23 bp, Homo sapiens
  source 1..23: mol_type = other DNA
gataggaaaatcagtgtacttgg

SEQ ID NO: 3343 - DNA, 23 bp, Homo sapiens
  source 1..23: mol_type = other DNA
cacagggaaaccagtgggtttgg

SEQ ID NO: 3344 - DNA, 23 bp, Homo sapiens
  source 1..23: mol_type = other DNA
tagaggggacccagaaagtctgg

SEQ ID NO: 3345 - DNA, 23 bp, Homo sapiens
  source 1..23: mol_type = other DNA
tcttgaaaaacaagtgagtactg

SEQ ID NO: 3346 - DNA, 23 bp, Homo sapiens
  source 1..23: mol_type = other DNA
tatatgaaaaccagtagattgag

SEQ ID NO: 3347 - DNA, 23 bp, Homo sapiens
  source 1..23: mol_type = other DNA
tataggaattgcattgaatctgt

SEQ ID NO: 3348 - DNA, 22 bp, Homo sapiens
  source 1..22: mol_type = other DNA
tgtgggagaaccatgagtccag

SEQ ID NO: 3349 - DNA, 23 bp, Homo sapiens
  source 1..23: mol_type = other DNA
catagaaataccagccagtcccg

SEQ ID NO: 3350 - DNA, 23 bp, Homo sapiens
  source 1..23: mol_type = other DNA
tccaagaaaaccactgagacctg

SEQ ID NO: 3351 - DNA, 23 bp, Homo sapiens
  source 1..23: mol_type = other DNA
tacataaaaaccaatgagttctg

SEQ ID NO: 3352 - DNA, 23 bp, Homo sapiens
  source 1..23: mol_type = other DNA
tgtaggataataagtgatcctgg

SEQ ID NO: 3353 - DNA, 22 bp, Homo sapiens
  source 1..22: mol_type = other DNA
tatagaaataccgtgaaccagg

SEQ ID NO: 3354 - DNA, 22 bp, Homo sapiens
  source 1..22: mol_type = other DNA
catagcaaaaccatgagtcaag

SEQ ID NO: 3355 - DNA, 22 bp, Homo sapiens
  source 1..22: mol_type = other DNA
tataggatatcagtgaggcagg

SEQ ID NO: 3356 - DNA, 22 bp, Homo sapiens
  source 1..22: mol_type = other DNA
tgtaggataacagtgagtaggg

SEQ ID NO: 3357 - DNA, 22 bp, Homo sapiens
  source 1..22: mol_type = other DNA
agtagaaaaaccactgagctgg

SEQ ID NO: 3358 - DNA, 22 bp, Homo sapiens
  source 1..22: mol_type = other DNA
catatggaaccagtgactctgg

SEQ ID NO: 3359 - DNA, 23 bp, Homo sapiens
  source 1..23: mol_type = other DNA
gataggaaaaccagttaggaggt

SEQ ID NO: 3360 - DNA, 23 bp, Homo sapiens
  source 1..23: mol_type = other DNA
caggggaaaaccagtgagccagg

SEQ ID NO: 3361 - DNA, 21 bp, Homo sapiens
  source 1..21: mol_type = other DNA
tataggctacagtgagtcatg

SEQ ID NO: 3362 - DNA, 22 bp, Homo sapiens
  source 1..22: mol_type = other DNA
agtaggaggccagtgagtcagg

SEQ ID NO: 3363 - DNA, 23 bp, Homo sapiens
  source 1..23: mol_type = other DNA
agggagaaaaccagtgagtgtgg

SEQ ID NO: 3364 - DNA, 22 bp, Homo sapiens
  source 1..22: mol_type = other DNA
tatttggaaaccatgagtctga

SEQ ID NO: 3365 - DNA, 22 bp, Homo sapiens
  source 1..22: mol_type = other DNA
gatagggaaaccaggaaccagg

SEQ ID NO: 3366 - DNA, 22 bp, Homo sapiens
  source 1..22: mol_type = other DNA
tgtcagaaaaccagtgaacagg

SEQ ID NO: 3367 - DNA, 23 bp, Homo sapiens
  source 1..23: mol_type = other DNA
tggaggtaaaccagtgaatctgg

SEQ ID NO: 3368 - DNA, 23 bp, Homo sapiens
  source 1..23: mol_type = other DNA
gctagcaaaaccagtaagttggt

SEQ ID NO: 3369 - DNA, 22 bp, Homo sapiens
  source 1..22: mol_type = other DNA
cataggaaaacagtgggtgtgg

SEQ ID NO: 3370 - DNA, 22 bp, Homo sapiens
  source 1..22: mol_type = other DNA
tgttgaaaaccagtgagttcag

SEQ ID NO: 3371 - DNA, 23 bp, Homo sapiens
  source 1..23: mol_type = other DNA
tataaggaatccagtgagtagtg

SEQ ID NO: 3372 - DNA, 22 bp, Homo sapiens
  source 1..22: mol_type = other DNA
cataagaaagcagtgagtcaga

SEQ ID NO: 3373 - DNA, 23 bp, Homo sapiens
  source 1..23: mol_type = other DNA
cataagtaaagcagtgagtctgg

SEQ ID NO: 3374 - DNA, 22 bp, Homo sapiens
  source 1..22: mol_type = other DNA
tgtagcaaaaacagtgatcaga

SEQ ID NO: 3375 - DNA, 22 bp, Homo sapiens
  source 1..22: mol_type = other DNA
tctcagaaaaccaatgagctgg

SEQ ID NO: 3376 - DNA, 22 bp, Homo sapiens
  source 1..22: mol_type = other DNA
tatggggaaccagtgagtgagg

SEQ ID NO: 3377 - DNA, 22 bp, Homo sapiens
  source 1..22: mol_type = other DNA
tttctaaaaaccatgagtctgg

SEQ ID NO: 3378 - DNA, 23 bp, Homo sapiens
  source 1..23: mol_type = other DNA
tgcagggaaaccagtcagtagga

SEQ ID NO: 3379 - DNA, 22 bp, Homo sapiens
  source 1..22: mol_type = other DNA
cttcggaaaaccagtgaccagg

SEQ ID NO: 3380 - DNA, 23 bp, Homo sapiens
  source 1..23: mol_type = other DNA
tataagaaaaccagtgcaagtgt

SEQ ID NO: 3381 - DNA, 22 bp, Homo sapiens
  source 1..22: mol_type = other DNA
tataagaaaccagtgagacaaa

SEQ ID NO: 3382 - DNA, 23 bp, Homo sapiens
  source 1..23: mol_type = other DNA
tataggaaaaccaggggtcaaag

SEQ ID NO: 3383 - DNA, 23 bp, Homo sapiens
  source 1..23: mol_type = other DNA
tatatagaagccagtggatctgg

SEQ ID NO: 3384 - DNA, 24 bp, Homo sapiens
  source 1..24: mol_type = other DNA
tatagagcaaaccagtgagggaag

SEQ ID NO: 3385 - DNA, 22 bp, Homo sapiens
  source 1..22: mol_type = other DNA
tatagcaaaccaatgatcctgg

SEQ ID NO: 3386 - DNA, 23 bp, Homo sapiens
  source 1..23: mol_type = other DNA
aaacggaaaaccagggagtctga

SEQ ID NO: 3387 - DNA, 23 bp, Homo sapiens
  source 1..23: mol_type = other DNA
tctactgaaacctgtgagtcagg

SEQ ID NO: 3388 - DNA, 22 bp, Homo sapiens
  source 1..22: mol_type = other DNA
cataaaaaaacagtgagtcggt

SEQ ID NO: 3389 - DNA, 23 bp, Homo sapiens
  source 1..23: mol_type = other DNA
taggtgtaaaccactgagcccgg

SEQ ID NO: 3390 - DNA, 22 bp, Homo sapiens
  source 1..22: mol_type = other DNA
tgttggaaaccagtgaggtagg

SEQ ID NO: 3391 - DNA, 23 bp, Homo sapiens
  source 1..23: mol_type = other DNA
ctcatgaaaaacagtgagtcagg

SEQ ID NO: 3392 - DNA, 24 bp, Homo sapiens
  source 1..24: mol_type = other DNA
tataggttaactaatgaggtctgg

SEQ ID NO: 3393 - DNA, 22 bp, Homo sapiens
  source 1..22: mol_type = other DNA
agaaggaaaaccagtggtcatg

SEQ ID NO: 3394 - DNA, 24 bp, Homo sapiens
  source 1..24: mol_type = other DNA
aatagagaaaacaagtaagtcaag

SEQ ID NO: 3395 - DNA, 23 bp, Homo sapiens
  source 1..23: mol_type = other DNA
tacaaataaaccagtgagtgtgt

SEQ ID NO: 3396 - DNA, 23 bp, Homo sapiens
  source 1..23: mol_type = other DNA
tataagaagaccagtgtggctgg

SEQ ID NO: 3397 - DNA, 22 bp, Homo sapiens
  source 1..22: mol_type = other DNA
tatagaaacccaatgagctggg

SEQ ID NO: 3398 - DNA, 23 bp, Homo sapiens
  source 1..23: mol_type = other DNA
tagaggaaaacaaatgaatcaac

SEQ ID NO: 3399 - DNA, 23 bp, Homo sapiens
  source 1..23: mol_type = other DNA
taggtgaaagccactgagcccgg

SEQ ID NO: 3400 - DNA, 23 bp, Homo sapiens
  source 1..23: mol_type = other DNA
tttaggaaatccagtatttctgg

SEQ ID NO: 3401 - DNA, 23 bp, Homo sapiens
  source 1..23: mol_type = other DNA
cccaggacacccagtgagtgagg

SEQ ID NO: 3402 - DNA, 23 bp, Homo sapiens
  source 1..23: mol_type = other DNA
tatagataaatcagtggctgggg

SEQ ID NO: 3403 - DNA, 23 bp, Homo sapiens
  source 1..23: mol_type = other DNA
tataggacaaccagtgatgacca

SEQ ID NO: 3404 - DNA, 23 bp, Homo sapiens
  source 1..23: mol_type = other DNA
caaggaaaaaccagggagccagg

SEQ ID NO: 3405 - DNA, 22 bp, Homo sapiens
  source 1..22: mol_type = other DNA
tatatgaaaaacactagtttgg

SEQ ID NO: 3406 - DNA, 22 bp, Homo sapiens
  source 1..22: mol_type = other DNA
tataggaaaacccagagtattg

SEQ ID NO: 3407 - DNA, 23 bp, Homo sapiens
  source 1..23: mol_type = other DNA
catagttaaactagtgaagctgg

SEQ ID NO: 3408 - DNA, 23 bp, Homo sapiens
  source 1..23: mol_type = other DNA
tataggaaaatcattcagtattt

SEQ ID NO: 3409 - DNA, 22 bp, Homo sapiens
  source 1..22: mol_type = other DNA
tataggtaaactgtgtgtcatg

SEQ ID NO: 3410 - DNA, 22 bp, Homo sapiens
  source 1..22: mol_type = other DNA
aaaaggaaagccagtgacctgg

SEQ ID NO: 3411 - DNA, 23 bp, Homo sapiens
  source 1..23: mol_type = other DNA
aaatagaaaaccagtaagtcatg

SEQ ID NO: 3412 - DNA, 23 bp, Homo sapiens
  source 1..23: mol_type = other DNA
tatagtaaaactagtgggtggga

SEQ ID NO: 3413 - DNA, 24 bp, Homo sapiens
  source 1..24: mol_type = other DNA
aaaaggaataaccagtgagtagga

SEQ ID NO: 3414 - DNA, 23 bp, Homo sapiens
  source 1..23: mol_type = other DNA
tctttggaaaccagagagtcaag

SEQ ID NO: 3415 - DNA, 23 bp, Homo sapiens
  source 1..23: mol_type = other DNA
agtaagaaaacaagtgagcaggg

SEQ ID NO: 3416 - DNA, 22 bp, Homo sapiens
  source 1..22: mol_type = other DNA
cgtttgaaaaccatgagtctgg

SEQ ID NO: 3417 - DNA, 22 bp, Homo sapiens
  source 1..22: mol_type = other DNA
taatgaaaaaccatgagtcggg

SEQ ID NO: 3418 - DNA, 24 bp, Homo sapiens
  source 1..24: mol_type = other DNA
tatatggaaaacccttgagtggga

SEQ ID NO: 3419 - DNA, 23 bp, Homo sapiens
  source 1..23: mol_type = other DNA
attttggaaaccagtgagtcaga

SEQ ID NO: 3420 - DNA, 23 bp, Homo sapiens
  source 1..23: mol_type = other DNA
acagagaaaaccagtgagactgg

SEQ ID NO: 3421 - DNA, 24 bp, Homo sapiens
  source 1..24: mol_type = other DNA
tgtagaaaaaaccagcaagtcagg

SEQ ID NO: 3422 - DNA, 23 bp, Homo sapiens
  source 1..23: mol_type = other DNA
aaaaggaaaaccagagactgggt

SEQ ID NO: 3423 - DNA, 21 bp, Homo sapiens
  source 1..21: mol_type = other DNA
cttaggaaacagtgagtgagg

SEQ ID NO: 3424 - DNA, 23 bp, Homo sapiens
  source 1..23: mol_type = other DNA
ggttggaaaaccagtgggtgggt

SEQ ID NO: 3425 - DNA, 23 bp, Homo sapiens
  source 1..23: mol_type = other DNA
cagaggaaaaccagtgctggggg

SEQ ID NO: 3426 - DNA, 23 bp, Homo sapiens
  source 1..23: mol_type = other DNA
tatagggaaaccagaaggcaggg

SEQ ID NO: 3427 - DNA, 23 bp, Homo sapiens
  source 1..23: mol_type = other DNA
aggtgggaaaccagtgagtccag

SEQ ID NO: 3428 - DNA, 23 bp, Homo sapiens
  source 1..23: mol_type = other DNA
tataaggatacctgtgagccggg

SEQ ID NO: 3429 - DNA, 22 bp, Homo sapiens
  source 1..22: mol_type = other DNA
tgtagtaaaactaggagtccag

SEQ ID NO: 3430 - DNA, 21 bp, Homo sapiens
  source 1..21: mol_type = other DNA
tgtatgtaaaccagtgacagg

SEQ ID NO: 3431 - DNA, 24 bp, Homo sapiens
  source 1..24: mol_type = other DNA
tatatggaaaactagagagtaggg

SEQ ID NO: 3432 - DNA, 23 bp, Homo sapiens
  source 1..23: mol_type = other DNA
tataggaagtccagtgagccttg

SEQ ID NO: 3433 - DNA, 23 bp, Homo sapiens
  source 1..23: mol_type = other DNA
catagcaaagccagggagtggga

SEQ ID NO: 3434 - DNA, 22 bp, Homo sapiens
  source 1..22: mol_type = other DNA
tataagaataaagtgagtgagg

SEQ ID NO: 3435 - DNA, 23 bp, Homo sapiens
  source 1..23: mol_type = other DNA
caggcgtgaaccagtgagtctgg

SEQ ID NO: 3436 - DNA, 23 bp, Homo sapiens
  source 1..23: mol_type = other DNA
aggacggaaaccagggagtccgg

SEQ ID NO: 3437 - DNA, 21 bp, Homo sapiens
  source 1..21: mol_type = other DNA
cctaggaaacagagagtcggg

SEQ ID NO: 3438 - DNA, 23 bp, Homo sapiens
  source 1..23: mol_type = other DNA
agtaggaagaccagcgaggctgg

SEQ ID NO: 3439 - DNA, 21 bp, Homo sapiens
  source 1..21: mol_type = other DNA
tgtgggaaaaccagtttctgg

SEQ ID NO: 3440 - DNA, 23 bp, Homo sapiens
  source 1..23: mol_type = other DNA
agtaggaaaacatgtgagtaaag

SEQ ID NO: 3441 - DNA, 22 bp, Homo sapiens
  source 1..22: mol_type = other DNA
taatggaaaaccagtaatgagg

SEQ ID NO: 3442 - DNA, 25 bp, Homo sapiens
  source 1..25: mol_type = other DNA
tatagaaaaacctaagtaagactgg

SEQ ID NO: 3443 - DNA, 23 bp, Homo sapiens
  source 1..23: mol_type = other DNA
agaaagaaacccagagagtcagg

SEQ ID NO: 3444 - DNA, 23 bp, Homo sapiens
  source 1..23: mol_type = other DNA
aagaggaaagcaaaggagtcagg

SEQ ID NO: 3445 - DNA, 23 bp, Homo sapiens
  source 1..23: mol_type = other DNA
attaggaaaaccagccaggcatg

SEQ ID NO: 3446 - DNA, 22 bp, Homo sapiens
  source 1..22: mol_type = other DNA
taaatggtaaccaggagtctgg

SEQ ID NO: 3447 - DNA, 23 bp, Homo sapiens
  source 1..23: mol_type = other DNA
tattcgagaaccattgattcctg

SEQ ID NO: 3448 - DNA, 23 bp, Homo sapiens
  source 1..23: mol_type = other DNA
tcttggacaagcagtgagcaagg

SEQ ID NO: 3449 - DNA, 23 bp, Homo sapiens
  source 1..23: mol_type = other DNA
tgtaggtaaacttttgagtcagg

SEQ ID NO: 3450 - DNA, 23 bp, Homo sapiens
  source 1..23: mol_type = other DNA
tatagggacaccagtgatgtcag

SEQ ID NO: 3451 - DNA, 22 bp, Homo sapiens
  source 1..22: mol_type = other DNA
aataggagaactaggagacagg

SEQ ID NO: 3452 - DNA, 23 bp, Homo sapiens
  source 1..23: mol_type = other DNA
aggagggaaaccagtgagcaggg

SEQ ID NO: 3453 - DNA, 22 bp, Homo sapiens
  source 1..22: mol_type = other DNA
gatagtaaaccagtgagcaggg

SEQ ID NO: 3454 - DNA, 21 bp, Homo sapiens
  source 1..21: mol_type = other DNA
ggtaggaaccagtgagtcaga

SEQ ID NO: 3455 - DNA, 23 bp, Homo sapiens
  source 1..23: mol_type = other DNA
tgtaggtaaaccagtgtcatggg

SEQ ID NO: 3456 - DNA, 22 bp, Homo sapiens
  source 1..22: mol_type = other DNA
aataggagtccagtgagtttgg

SEQ ID NO: 3457 - DNA, 22 bp, Homo sapiens
  source 1..22: mol_type = other DNA
tctaggaaaaccatgagttggg

SEQ ID NO: 3458 - DNA, 23 bp, Homo sapiens
  source 1..23: mol_type = other DNA
tgtaggaagaccagtgaggccag

SEQ ID NO: 3459 - DNA, 23 bp, Homo sapiens
  source 1..23: mol_type = other DNA
ggaaggaaaaccagtgaggaggc

SEQ ID NO: 3460 - DNA, 21 bp, Homo sapiens
  source 1..21: mol_type = other DNA
tgtaggaaccagtgattgagg

SEQ ID NO: 3461 - DNA, 23 bp, Homo sapiens
  source 1..23: mol_type = other DNA
ttaagagaaaccagtgagtagga

SEQ ID NO: 3462 - DNA, 21 bp, Homo sapiens
  source 1..21: mol_type = other DNA
aataggaaacagtgagtacag

SEQ ID NO: 3463 - DNA, 23 bp, Homo sapiens
  source 1..23: mol_type = other DNA
tggggggaaaccagtgagtcagg

SEQ ID NO: 3464 - DNA, 23 bp, Homo sapiens
  source 1..23: mol_type = other DNA
gataggaaaacctatgaatagga

SEQ ID NO: 3465 - DNA, 23 bp, Homo sapiens
  source 1..23: mol_type = other DNA
cctaggaaagccagtgatttggt

SEQ ID NO: 3466 - DNA, 22 bp, Homo sapiens
  source 1..22: mol_type = other DNA
aataggaaaccagttgttctgg

SEQ ID NO: 3467 - DNA, 22 bp, Homo sapiens
  source 1..22: mol_type = other DNA
tttaggtatccagtgagttggg

SEQ ID NO: 3468 - DNA, 23 bp, Homo sapiens
  source 1..23: mol_type = other DNA
ggtaggaagaccagtgaggaagg

SEQ ID NO: 3469 - DNA, 22 bp, Homo sapiens
  source 1..22: mol_type = other DNA
tataggaagcaggtgagccagg

SEQ ID NO: 3470 - DNA, 22 bp, Homo sapiens
  source 1..22: mol_type = other DNA
tataataaaccagtgggccagg

SEQ ID NO: 3471 - DNA, 23 bp, Homo sapiens
  source 1..23: mol_type = other DNA
tagagcaaaaccagtgaatccag

SEQ ID NO: 3472 - DNA, 21 bp, Homo sapiens
  source 1..21: mol_type = other DNA
tgcaggaaaaccagagcctgg

SEQ ID NO: 3473 - DNA, 23 bp, Homo sapiens
  source 1..23: mol_type = other DNA
tatagggagaccagtgaggggct

SEQ ID NO: 3474 - DNA, 24 bp, Homo sapiens
  source 1..24: mol_type = other DNA
ctcagtaaaaccaggtgagtctgg

SEQ ID NO: 3475 - DNA, 23 bp, Homo sapiens
  source 1..23: mol_type = other DNA
tattaggacaccagtgtatcagg

SEQ ID NO: 3476 - DNA, 23 bp, Homo sapiens
  source 1..23: mol_type = other DNA
tataagaatcccagagagtcaag

SEQ ID NO: 3477 - DNA, 22 bp, Homo sapiens
  source 1..22: mol_type = other DNA
ttatggaaaaccaggattctgg

SEQ ID NO: 3478 - DNA, 23 bp, Homo sapiens
  source 1..23: mol_type = other DNA
aataggaaaacatgtgtgtcagg

SEQ ID NO: 3479 - DNA, 23 bp, Homo sapiens
  source 1..23: mol_type = other DNA
aagaggagaaccagagagtcaag

SEQ ID NO: 3480 - DNA, 23 bp, Homo sapiens
  source 1..23: mol_type = other DNA
atttttaaaaccagtgagtcctg

SEQ ID NO: 3481 - DNA, 23 bp, Homo sapiens
  source 1..23: mol_type = other DNA
gataggaaaaccagtgagggacc

SEQ ID NO: 3482 - DNA, 24 bp, Homo sapiens
  source 1..24: mol_type = other DNA
tgtaggatgaaccaatgagtgagg

SEQ ID NO: 3483 - DNA, 22 bp, Homo sapiens
  source 1..22: mol_type = other DNA
gatttgaaaccagagagtctgg

SEQ ID NO: 3484 - DNA, 23 bp, Homo sapiens
  source 1..23: mol_type = other DNA
cataggtaaactggtgagttggg

SEQ ID NO: 3485 - DNA, 22 bp, Homo sapiens
  source 1..22: mol_type = other DNA
tgaaggaaaccagggagtccag

SEQ ID NO: 3486 - DNA, 22 bp, Homo sapiens
  source 1..22: mol_type = other DNA
taaccagcaccagtgagtcggg

SEQ ID NO: 3487 - DNA, 22 bp, Homo sapiens
  source 1..22: mol_type = other DNA
cataggtaaacattgattctgg

SEQ ID NO: 3488 - DNA, 23 bp, Homo sapiens
  source 1..23: mol_type = other DNA
tgatagaaaaccagtggatctgg

SEQ ID NO: 3489 - DNA, 22 bp, Homo sapiens
  source 1..22: mol_type = other DNA
gatagttaaccagggagtctgg

SEQ ID NO: 3490 - DNA, 22 bp, Homo sapiens
  source 1..22: mol_type = other DNA
agtaggaaaaccagtagtctaa

SEQ ID NO: 3491 - DNA, 22 bp, Homo sapiens
  source 1..22: mol_type = other DNA
gatggaaagccagtgagctggg

SEQ ID NO: 3492 - DNA, 23 bp, Homo sapiens
  source 1..23: mol_type = other DNA
tactgtgaaaccagtgagtctgc

SEQ ID NO: 3493 - DNA, 22 bp, Homo sapiens
  source 1..22: mol_type = other DNA
tccaggataaccaatgagctgg

SEQ ID NO: 3494 - DNA, 23 bp, Homo sapiens
  source 1..23: mol_type = other DNA
tgtgggcgaaccagtgagtgagt

SEQ ID NO: 3495 - DNA, 23 bp, Homo sapiens
  source 1..23: mol_type = other DNA
tttcccaaaaccagtgagcatgg

SEQ ID NO: 3496 - DNA, 22 bp, Homo sapiens
  source 1..22: mol_type = other DNA
tgtagtaataacagtgatcagg

SEQ ID NO: 3497 - DNA, 22 bp, Homo sapiens
  source 1..22: mol_type = other DNA
tgaaagaaagccagtgagctgg

SEQ ID NO: 3498 - DNA, 23 bp, Homo sapiens
  source 1..23: mol_type = other DNA
gataggaaaagcagtgattttgg

SEQ ID NO: 3499 - DNA, 23 bp, Homo sapiens
  source 1..23: mol_type = other DNA
tgtaagaagagctgtgagtcaag

SEQ ID NO: 3500 - DNA, 23 bp, Homo sapiens
  source 1..23: mol_type = other DNA
tatctaataaccagtgagattgg

SEQ ID NO: 3501 - DNA, 23 bp, Homo sapiens
  source 1..23: mol_type = other DNA
aacagggaaaccagtgagcccaa

SEQ ID NO: 3502 - DNA, 22 bp, Homo sapiens
  source 1..22: mol_type = other DNA
gggaggaaaaaagtgagtctgg

SEQ ID NO: 3503 - DNA, 24 bp, Homo sapiens
  source 1..24: mol_type = other DNA
catagaagaaccagtgatatcagg

SEQ ID NO: 3504 - DNA, 22 bp, Homo sapiens
  source 1..22: mol_type = other DNA
tattttaaaaccagtagtcaag

SEQ ID NO: 3505 - DNA, 23 bp, Homo sapiens
  source 1..23: mol_type = other DNA
tataagaaaaacagagaaacggc

SEQ ID NO: 3506 - DNA, 23 bp, Homo sapiens
  source 1..23: mol_type = other DNA
aataggtaaacaaaggagtgtgg

SEQ ID NO: 3507 - DNA, 22 bp, Homo sapiens
  source 1..22: mol_type = other DNA
gataagaaaactaagagtcagg

SEQ ID NO: 3508 - DNA, 21 bp, Homo sapiens
  source 1..21: mol_type = other DNA
tctaggaaaaccagagtcaga

SEQ ID NO: 3509 - DNA, 23 bp, Homo sapiens
  source 1..23: mol_type = other DNA
aataggaacagaagttactcagg

SEQ ID NO: 3510 - DNA, 23 bp, Homo sapiens
  source 1..23: mol_type = other DNA
tgtaagaaaaccagtgcttggag

SEQ ID NO: 3511 - DNA, 23 bp, Homo sapiens
  source 1..23: mol_type = other DNA
aacaggtaaaccagtgaggctcc

SEQ ID NO: 3512 - DNA, 23 bp, Homo sapiens
  source 1..23: mol_type = other DNA
catagaataaccagagtgtcatg

SEQ ID NO: 3513 - DNA, 23 bp, Homo sapiens
  source 1..23: mol_type = other DNA
tatagaaacactactgagttttg

SEQ ID NO: 3514 - DNA, 22 bp, Homo sapiens
  source 1..22: mol_type = other DNA
gacaggaaaaccaggggtctga

SEQ ID NO: 3515 - DNA, 23 bp, Homo sapiens
  source 1..23: mol_type = other DNA
tataagaacacttgtgacttagg

SEQ ID NO: 3516 - DNA, 23 bp, Homo sapiens
  source 1..23: mol_type = other DNA
gataggaaaaggagtttggcagg

SEQ ID NO: 3517 - DNA, 22 bp, Homo sapiens
  source 1..22: mol_type = other DNA
tataggaaaacaggaactctgg

SEQ ID NO: 3518 - DNA, 23 bp, Homo sapiens
  source 1..23: mol_type = other DNA
tataataaaaccagtgataaggg

SEQ ID NO: 3519 - DNA, 23 bp, Homo sapiens
  source 1..23: mol_type = other DNA
ataaagaaaaacagtgagtctgg

SEQ ID NO: 3520 - DNA, 22 bp, Homo sapiens
  source 1..22: mol_type = other DNA
aatgtaaaaaccatgagtcagg

SEQ ID NO: 3521 - DNA, 23 bp, Homo sapiens
  source 1..23: mol_type = other DNA
tatagagagaccagtgagccaag

SEQ ID NO: 3522 - DNA, 23 bp, Homo sapiens
  source 1..23: mol_type = other DNA
attaggaacaccagtgagttgcc

SEQ ID NO: 3523 - DNA, 23 bp, Homo sapiens
  source 1..23: mol_type = other DNA
tataaggataccagtaatactgg

SEQ ID NO: 3524 - DNA, 23 bp, Homo sapiens
  source 1..23: mol_type = other DNA
actaggaaatccagtgactcagg

SEQ ID NO: 3525 - DNA, 23 bp, Homo sapiens
  source 1..23: mol_type = other DNA
cttcagaaaaccagggagtctgg

SEQ ID NO: 3526 - DNA, 23 bp, Homo sapiens
  source 1..23: mol_type = other DNA
gtcaagaaaaccagtgattcaga

SEQ ID NO: 3527 - DNA, 23 bp, Homo sapiens
  source 1..23: mol_type = other DNA
gatagaaaaaacagtgagttaga

SEQ ID NO: 3528 - DNA, 23 bp, Homo sapiens
  source 1..23: mol_type = other DNA
tataagaaaaccagtcagattgg

SEQ ID NO: 3529 - DNA, 24 bp, Homo sapiens
  source 1..24: mol_type = other DNA
gctgggagaaaccagtgagtttgg

SEQ ID NO: 3530 - DNA, 23 bp, Homo sapiens
  source 1..23: mol_type = other DNA
aatacataaaccaatgagtaggg

SEQ ID NO: 3531 - DNA, 23 bp, Homo sapiens
  source 1..23: mol_type = other DNA
tattggcaaaccagtgagtcgaa

SEQ ID NO: 3532 - DNA, 23 bp, Homo sapiens
  source 1..23: mol_type = other DNA
tggaggaaggccagtgagttggg

SEQ ID NO: 3533 - DNA, 23 bp, Homo sapiens
  source 1..23: mol_type = other DNA
catagtaaaaccactgagcacag

SEQ ID NO: 3534 - DNA, 24 bp, Homo sapiens
  source 1..24: mol_type = other DNA
tataaagaaaccagtgaagtcctg

SEQ ID NO: 3535 - DNA, 22 bp, Homo sapiens
  source 1..22: mol_type = other DNA
tttttgaaaaccagttatcagg

SEQ ID NO: 3536 - DNA, 22 bp, Homo sapiens
  source 1..22: mol_type = other DNA
gatcagaaaacagtgagttagg

SEQ ID NO: 3537 - DNA, 21 bp, Homo sapiens
  source 1..21: mol_type = other DNA
ggtaggaagaccagagtcagg

SEQ ID NO: 3538 - DNA, 23 bp, Homo sapiens
  source 1..23: mol_type = other DNA
aattggaaagccagtgatatggg

SEQ ID NO: 3539 - DNA, 23 bp, Homo sapiens
  source 1..23: mol_type = other DNA
cataggaaaagaagtgatttaag

SEQ ID NO: 3540 - DNA, 23 bp, Homo sapiens
  source 1..23: mol_type = other DNA
tataataaaatcagtgataaggg

SEQ ID NO: 3541 - DNA, 23 bp, Homo sapiens
  source 1..23: mol_type = other DNA
tttaggacaacaaatgagtcagg

SEQ ID NO: 3542 - DNA, 23 bp, Homo sapiens
  source 1..23: mol_type = other DNA
taaaggaaaaccagaggttagag

SEQ ID NO: 3543 - DNA, 22 bp, Homo sapiens
  source 1..22: mol_type = other DNA
aacaggaaaaccagtgatatgc

SEQ ID NO: 3544 - DNA, 22 bp, Homo sapiens
  source 1..22: mol_type = other DNA
tataagaaaacaagtattcagg

SEQ ID NO: 3545 - DNA, 23 bp, Homo sapiens
  source 1..23: mol_type = other DNA
tgcaggaaaaccaggaaggcttg

SEQ ID NO: 3546 - DNA, 24 bp, Homo sapiens
  source 1..24: mol_type = other DNA
tctgggaaaaccagtggggtcctg

SEQ ID NO: 3547 - DNA, 22 bp, Homo sapiens
  source 1..22: mol_type = other DNA
tgtaggaaaacagttcatcagg

SEQ ID NO: 3548 - DNA, 23 bp, Homo sapiens
  source 1..23: mol_type = other DNA
tcatagagaaccagtgagccagg

SEQ ID NO: 3549 - DNA, 22 bp, Homo sapiens
  source 1..22: mol_type = other DNA
agtagaaaatccagtgagctgg

SEQ ID NO: 3550 - DNA, 22 bp, Homo sapiens
  source 1..22: mol_type = other DNA
agtaggaaaaccagtgctgagg

SEQ ID NO: 3551 - DNA, 22 bp, Homo sapiens
  source 1..22: mol_type = other DNA
tatggaaaaccaatgagcacgg

SEQ ID NO: 3552 - DNA, 23 bp, Homo sapiens
  source 1..23: mol_type = other DNA
aatgaggaaaacagtgggtcagg

SEQ ID NO: 3553 - DNA, 21 bp, Homo sapiens
  source 1..21: mol_type = other DNA
tgtaaaaaccactgagtatgg

SEQ ID NO: 3554 - DNA, 23 bp, Homo sapiens
  source 1..23: mol_type = other DNA
tataggaaatccagtgtgtaaga

SEQ ID NO: 3555 - DNA, 22 bp, Homo sapiens
  source 1..22: mol_type = other DNA
tataggaaaaccagatgccagg

SEQ ID NO: 3556 - DNA, 23 bp, Homo sapiens
  source 1..23: mol_type = other DNA
tgtaggaaaaccagagaaaggag

SEQ ID NO: 3557 - DNA, 23 bp, Homo sapiens
  source 1..23: mol_type = other DNA
agtaggaaaaacagtgacctagg

SEQ ID NO: 3558 - DNA, 23 bp, Homo sapiens
  source 1..23: mol_type = other DNA
tgcaggaaaaccagttaggaggc

SEQ ID NO: 3559 - DNA, 22 bp, Homo sapiens
  source 1..22: mol_type = other DNA
tattggagaccagtgagacagg

SEQ ID NO: 3560 - DNA, 21 bp, Homo sapiens
  source 1..21: mol_type = other DNA
tttagcaaccagagagtctgg

SEQ ID NO: 3561 - DNA, 23 bp, Homo sapiens
  source 1..23: mol_type = other DNA
gccaaggagaccagtgagtcagg

SEQ ID NO: 3562 - DNA, 22 bp, Homo sapiens
  source 1..22: mol_type = other DNA
tattggaagccagaaagtcagg

SEQ ID NO: 3563 - DNA, 23 bp, Homo sapiens
  source 1..23: mol_type = other DNA
taaaggcagagaagtgagttggg

SEQ ID NO: 3564 - DNA, 23 bp, Homo sapiens
  source 1..23: mol_type = other DNA
ctttggaaaccaagtgagtgtgg

SEQ ID NO: 3565 - DNA, 22 bp, Homo sapiens
  source 1..22: mol_type = other DNA
gatgagaaaaccatgactcagg

SEQ ID NO: 3566 - DNA, 23 bp, Homo sapiens
  source 1..23: mol_type = other DNA
gataggaataccagagggtgggg

SEQ ID NO: 3567 - DNA, 23 bp, Homo sapiens
  source 1..23: mol_type = other DNA
tgtagtaaaaccaataactcttg

SEQ ID NO: 3568 - DNA, 24 bp, Homo sapiens
  source 1..24: mol_type = other DNA
aataggaaataccagtgagttgtt

SEQ ID NO: 3569 - DNA, 24 bp, Homo sapiens
  source 1..24: mol_type = other DNA
tacagtaaaacccagtgatcctgg

SEQ ID NO: 3570 - DNA, 22 bp, Homo sapiens
  source 1..22: mol_type = other DNA
cataggaacccagtgactgggg

SEQ ID NO: 3571 - DNA, 21 bp, Homo sapiens
  source 1..21: mol_type = other DNA
tataggagctagtgattcggg

SEQ ID NO: 3572 - DNA, 24 bp, Homo sapiens
  source 1..24: mol_type = other DNA
tataggaaaacccagtaaatgtag

SEQ ID NO: 3573 - DNA, 22 bp, Homo sapiens
  source 1..22: mol_type = other DNA
ttcaggaaaaccagtggagtgg

SEQ ID NO: 3574 - DNA, 22 bp, Homo sapiens
  source 1..22: mol_type = other DNA
tgtaggaaaacatatgatcagg

SEQ ID NO: 3575 - DNA, 23 bp, Homo sapiens
  source 1..23: mol_type = other DNA
aataggataaccagtcagtaggg

SEQ ID NO: 3576 - DNA, 23 bp, Homo sapiens
  source 1..23: mol_type = other DNA
tatagtaaaaccagtgagaagag

SEQ ID NO: 3577 - DNA, 22 bp, Homo sapiens
  source 1..22: mol_type = other DNA
tgtaggaaaacagtaagtcaag

SEQ ID NO: 3578 - DNA, 24 bp, Homo sapiens
  source 1..24: mol_type = other DNA
aataggaaataccagtgaattgga

SEQ ID NO: 3579 - DNA, 22 bp, Homo sapiens
  source 1..22: mol_type = other DNA
cataggaagacagtgattctgg

SEQ ID NO: 3580 - DNA, 22 bp, Homo sapiens
  source 1..22: mol_type = other DNA
tataagagaaccatgagacagg

SEQ ID NO: 3581 - DNA, 22 bp, Homo sapiens
  source 1..22: mol_type = other DNA
agtagggaaaccaagagtcagg

SEQ ID NO: 3582 - DNA, 22 bp, Homo sapiens
  source 1..22: mol_type = other DNA
tgtaggaaactagtgagtcaga

SEQ ID NO: 3583 - DNA, 23 bp, Homo sapiens
  source 1..23: mol_type = other DNA
gggaggagaaccagtgagtagga

SEQ ID NO: 3584 - DNA, 23 bp, Homo sapiens
  source 1..23: mol_type = other DNA
cataggtaaaccagagagaaggg

SEQ ID NO: 3585 - DNA, 22 bp, Homo sapiens
  source 1..22: mol_type = other DNA
taaagaaaatcagtgagttgga

SEQ ID NO: 3586 - DNA, 23 bp, Homo sapiens
  source 1..23: mol_type = other DNA
aataagagaaccagtgattcaag

SEQ ID NO: 3587 - DNA, 23 bp, Homo sapiens
  source 1..23: mol_type = other DNA
tgtaaagaaaccactgagttggg

SEQ ID NO: 3588 - DNA, 22 bp, Homo sapiens
  source 1..22: mol_type = other DNA
gagaagaaaaccagtagtcagg

SEQ ID NO: 3589 - DNA, 22 bp, Homo sapiens
  source 1..22: mol_type = other DNA
tataaggacaccagtgatatgg

SEQ ID NO: 3590 - DNA, 22 bp, Homo sapiens
  source 1..22: mol_type = other DNA
tataagaaaccagtgaggtctg

SEQ ID NO: 3591 - DNA, 23 bp, Homo sapiens
  source 1..23: mol_type = other DNA
gataggaattgcagtgagtcagt

SEQ ID NO: 3592 - DNA, 22 bp, Homo sapiens
  source 1..22: mol_type = other DNA
tataggaaaccaatgagggctg

SEQ ID NO: 3593 - DNA, 23 bp, Homo sapiens
  source 1..23: mol_type = other DNA
tgtagagataccactgagtcaga

SEQ ID NO: 3594 - DNA, 22 bp, Homo sapiens
  source 1..22: mol_type = other DNA
tataggaaaatcatgtgtacag

SEQ ID NO: 3595 - DNA, 23 bp, Homo sapiens
  source 1..23: mol_type = other DNA
ttcagggaaaccagtgagtcata

SEQ ID NO: 3596 - DNA, 23 bp, Homo sapiens
  source 1..23: mol_type = other DNA
ccagggaaaatcagtaagtcagg

SEQ ID NO: 3597 - DNA, 22 bp, Homo sapiens
  source 1..22: mol_type = other DNA
agtaggaaaacaaagagtctgg

SEQ ID NO: 3598 - DNA, 22 bp, Homo sapiens
  source 1..22: mol_type = other DNA
tatatggatatcagtgagctgg

SEQ ID NO: 3599 - DNA, 22 bp, Homo sapiens
  source 1..22: mol_type = other DNA
tctagaaaaccagagagtcttg

SEQ ID NO: 3600 - DNA, 23 bp, Homo sapiens
  source 1..23: mol_type = other DNA
ttcagggaaaccagtgagtcagg

SEQ ID NO: 3601 - DNA, 23 bp, Homo sapiens
  source 1..23: mol_type = other DNA
ttctgaataaccagtgagtcaag

SEQ ID NO: 3602 - DNA, 23 bp, Homo sapiens
  source 1..23: mol_type = other DNA
aatatgtaaaccaatgagcctgg

SEQ ID NO: 3603 - DNA, 23 bp, Homo sapiens
  source 1..23: mol_type = other DNA
gttaggaaaaccagttaggagga

SEQ ID NO: 3604 - DNA, 21 bp, Homo sapiens
  source 1..21: mol_type = other DNA
tatagggaaatcagtgtcatg

SEQ ID NO: 3605 - DNA, 22 bp, Homo sapiens
  source 1..22: mol_type = other DNA
ttcagtaaaaccaatgatcagg

SEQ ID NO: 3606 - DNA, 22 bp, Homo sapiens
  source 1..22: mol_type = other DNA
catgggaaaaccatgaattagg

SEQ ID NO: 3607 - DNA, 22 bp, Homo sapiens
  source 1..22: mol_type = other DNA
tataggcactcagtgagtcgag

SEQ ID NO: 3608 - DNA, 22 bp, Homo sapiens
  source 1..22: mol_type = other DNA
aagaataaaaccatgagtctgg

SEQ ID NO: 3609 - DNA, 23 bp, Homo sapiens
  source 1..23: mol_type = other DNA
cataaggataccagtgagattgg

SEQ ID NO: 3610 - DNA, 21 bp, Homo sapiens
  source 1..21: mol_type = other DNA
tgtaagaaaaccagattccgg

SEQ ID NO: 3611 - DNA, 23 bp, Homo sapiens
  source 1..23: mol_type = other DNA
tgtagttaaaccagtggctgggg

SEQ ID NO: 3612 - DNA, 24 bp, Homo sapiens
  source 1..24: mol_type = other DNA
tatacataaaaccagtgaatgtgg

SEQ ID NO: 3613 - DNA, 23 bp, Homo sapiens
  source 1..23: mol_type = other DNA
ttgaggagaaccagtgagtttgg

SEQ ID NO: 3614 - DNA, 23 bp, Homo sapiens
  source 1..23: mol_type = other DNA
cataggaaagacagagagtgggt

SEQ ID NO: 3615 - DNA, 23 bp, Homo sapiens
  source 1..23: mol_type = other DNA
gtgaggaaaaccattgagccagg

SEQ ID NO: 3616 - DNA, 24 bp, Homo sapiens
  source 1..24: mol_type = other DNA
gtaaggaaaagcagtgaagtcagg

SEQ ID NO: 3617 - DNA, 21 bp, Homo sapiens
  source 1..21: mol_type = other DNA
tggaggaaccactgagtcagg

SEQ ID NO: 3618 - DNA, 23 bp, Homo sapiens
  source 1..23: mol_type = other DNA
cagtggtaaaccagtgagtggtg

SEQ ID NO: 3619 - DNA, 22 bp, Homo sapiens
  source 1..22: mol_type = other DNA
ggtagggagccagtgagtcagg

SEQ ID NO: 3620 - DNA, 22 bp, Homo sapiens
  source 1..22: mol_type = other DNA
aatagtataaccaggagtgtgg

SEQ ID NO: 3621 - DNA, 23 bp, Homo sapiens
  source 1..23: mol_type = other DNA
tagaggaaaaccagtaaatggca

SEQ ID NO: 3622 - DNA, 23 bp, Homo sapiens
  source 1..23: mol_type = other DNA
tttctttaaaccagtgagtctag

SEQ ID NO: 3623 - DNA, 23 bp, Homo sapiens
  source 1..23: mol_type = other DNA
tgtatgaaaaaccatgtgtcagg

SEQ ID NO: 3624 - DNA, 23 bp, Homo sapiens
  source 1..23: mol_type = other DNA
gatggaagaaccactgagtcagg

SEQ ID NO: 3625 - DNA, 24 bp, Homo sapiens
  source 1..24: mol_type = other DNA
cataggaataccaggtaactcagg

SEQ ID NO: 3626 - DNA, 24 bp, Homo sapiens
  source 1..24: mol_type = other DNA
gataggagaaaccagtgagggtgg

SEQ ID NO: 3627 - DNA, 23 bp, Homo sapiens
  source 1..23: mol_type = other DNA
tgtaggataaacagtgagctagt

SEQ ID NO: 3628 - DNA, 23 bp, Homo sapiens
  source 1..23: mol_type = other DNA
aaaatagaaacctgtgagtcagg

SEQ ID NO: 3629 - DNA, 22 bp, Homo sapiens
  source 1..22: mol_type = other DNA
tcttggaaaacagtgagtgctg

SEQ ID NO: 3630 - DNA, 23 bp, Homo sapiens
  source 1..23: mol_type = other DNA
ggcaggaaaaccagtggggtggg

SEQ ID NO: 3631 - DNA, 22 bp, Homo sapiens
  source 1..22: mol_type = other DNA
ggtgggaacaccagtgagcagg

SEQ ID NO: 3632 - DNA, 23 bp, Homo sapiens
  source 1..23: mol_type = other DNA
tataggaatgctagtgattttgg

SEQ ID NO: 3633 - DNA, 24 bp, Homo sapiens
  source 1..24: mol_type = other DNA
tatagaaaacccagtaaaatctgg

SEQ ID NO: 3634 - DNA, 23 bp, Homo sapiens
  source 1..23: mol_type = other DNA
gcttggaaaaccagtgagccact

SEQ ID NO: 3635 - DNA, 23 bp, Homo sapiens
  source 1..23: mol_type = other DNA
cataagaaaaccattgagtagtg

SEQ ID NO: 3636 - DNA, 21 bp, Homo sapiens
  source 1..21: mol_type = other DNA
tataagaatacctgagtctgg

SEQ ID NO: 3637 - DNA, 23 bp, Homo sapiens
  source 1..23: mol_type = other DNA
tataggaaaaccagagatactag

SEQ ID NO: 3638 - DNA, 23 bp, Homo sapiens
  source 1..23: mol_type = other DNA
ttcaaaaaaaccaatgagtccag

SEQ ID NO: 3639 - DNA, 23 bp, Homo sapiens
  source 1..23: mol_type = other DNA
tatagtagaaacagtgagtcatc

SEQ ID NO: 3640 - DNA, 21 bp, Homo sapiens
  source 1..21: mol_type = other DNA
tataggttaaccattgtcagg

SEQ ID NO: 3641 - DNA, 24 bp, Homo sapiens
  source 1..24: mol_type = other DNA
aaaagggaaatcagtgaggtctgg

SEQ ID NO: 3642 - DNA, 21 bp, Homo sapiens
  source 1..21: mol_type = other DNA
tgaagaaaccagtgagtcaga

SEQ ID NO: 3643 - DNA, 23 bp, Homo sapiens
  source 1..23: mol_type = other DNA
ggtggaagaaccactgagtcagg

SEQ ID NO: 3644 - DNA, 23 bp, Homo sapiens
  source 1..23: mol_type = other DNA
ctaagggaaaccagtaattcagg

SEQ ID NO: 3645 - DNA, 22 bp, Homo sapiens
  source 1..22: mol_type = other DNA
taaactaaaaccagtgttctgg

SEQ ID NO: 3646 - DNA, 23 bp, Homo sapiens
  source 1..23: mol_type = other DNA
tgatggaaaaccagtgagggaag

SEQ ID NO: 3647 - DNA, 23 bp, Homo sapiens
  source 1..23: mol_type = other DNA
ttttagaagaccagtgagtcagg

SEQ ID NO: 3648 - DNA, 23 bp, Homo sapiens
  source 1..23: mol_type = other DNA
taaaggaaagccagagagtgagg

SEQ ID NO: 3649 - DNA, 23 bp, Homo sapiens
  source 1..23: mol_type = other DNA
cacaagaaaaccagtgagtgaac

SEQ ID NO: 3650 - DNA, 23 bp, Homo sapiens
  source 1..23: mol_type = other DNA
tataggaataccactgagtgtgt

SEQ ID NO: 3651 - DNA, 23 bp, Homo sapiens
  source 1..23: mol_type = other DNA
tataggaatactagtgagttttg

SEQ ID NO: 3652 - DNA, 23 bp, Homo sapiens
  source 1..23: mol_type = other DNA
aataacaaaaccagtgagtcaat

SEQ ID NO: 3653 - DNA, 23 bp, Homo sapiens
  source 1..23: mol_type = other DNA
tataggaatgctagtgattcttg

SEQ ID NO: 3654 - DNA, 23 bp, Homo sapiens
  source 1..23: mol_type = other DNA
aataggaaaatcggtgacttaga

SEQ ID NO: 3655 - DNA, 22 bp, Homo sapiens
  source 1..22: mol_type = other DNA
tatttgagaaccagtagtcagg

SEQ ID NO: 3656 - DNA, 23 bp, Homo sapiens
  source 1..23: mol_type = other DNA
tataggaaatgcactgattcaat

SEQ ID NO: 3657 - DNA, 23 bp, Homo sapiens
  source 1..23: mol_type = other DNA
aataggaaaatcagtgagaaagc

SEQ ID NO: 3658 - DNA, 23 bp, Homo sapiens
  source 1..23: mol_type = other DNA
tcggggaaagccagtgagccagg

SEQ ID NO: 3659 - DNA, 23 bp, Homo sapiens
  source 1..23: mol_type = other DNA
tatacagacaccagtgagtcagt

SEQ ID NO: 3660 - DNA, 24 bp, Homo sapiens
  source 1..24: mol_type = other DNA
tgtaggaaataccagtaacacagg

SEQ ID NO: 3661 - DNA, 23 bp, Homo sapiens
  source 1..23: mol_type = other DNA
tataggaaaatcagagatcgtga

SEQ ID NO: 3662 - DNA, 23 bp, Homo sapiens
  source 1..23: mol_type = other DNA
tataggagggcctgtgagcctgg

SEQ ID NO: 3663 - DNA, 23 bp, Homo sapiens
  source 1..23: mol_type = other DNA
ggaatgaaaaccagtgattcatg

SEQ ID NO: 3664 - DNA, 23 bp, Homo sapiens
  source 1..23: mol_type = other DNA
ggaagaaggaccagtgagtcagg

SEQ ID NO: 3665 - DNA, 23 bp, Homo sapiens
  source 1..23: mol_type = other DNA
tataggaaagcttgtgatttttg

SEQ ID NO: 3666 - DNA, 23 bp, Homo sapiens
  source 1..23: mol_type = other DNA
taatggtgaaccagagagtcatg

SEQ ID NO: 3667 - DNA, 24 bp, Homo sapiens
  source 1..24: mol_type = other DNA
aatagaaataaccagtgattcaag

SEQ ID NO: 3668 - DNA, 22 bp, Homo sapiens
  source 1..22: mol_type = other DNA
aacaggtaaaccagtggccagg

SEQ ID NO: 3669 - DNA, 21 bp, Homo sapiens
  source 1..21: mol_type = other DNA
tgtaggaaacattgagtctga

SEQ ID NO: 3670 - DNA, 23 bp, Homo sapiens
  source 1..23: mol_type = other DNA
tatgggatcaccagtgattctat

SEQ ID NO: 3671 - DNA, 23 bp, Homo sapiens
  source 1..23: mol_type = other DNA
ggcaggaaaaccagtgattatga

SEQ ID NO: 3672 - DNA, 23 bp, Homo sapiens
  source 1..23: mol_type = other DNA
tataggaaaactagtgattttca

SEQ ID NO: 3673 - DNA, 23 bp, Homo sapiens
  source 1..23: mol_type = other DNA
acttgaaaaaccagtgggtcaag

SEQ ID NO: 3674 - DNA, 23 bp, Homo sapiens
  source 1..23: mol_type = other DNA
tataggaaaacaattgactttta

SEQ ID NO: 3675 - DNA, 23 bp, Homo sapiens
  source 1..23: mol_type = other DNA
tatataaaaaccagtgactagct

SEQ ID NO: 3676 - DNA, 23 bp, Homo sapiens
  source 1..23: mol_type = other DNA
aataggaaaatcaatgagttcag

SEQ ID NO: 3677 - DNA, 23 bp, Homo sapiens
  source 1..23: mol_type = other DNA
attaggaaaaccatgtagtatgg

SEQ ID NO: 3678 - DNA, 23 bp, Homo sapiens
  source 1..23: mol_type = other DNA
tctaggaaaaccggtgtctggga

SEQ ID NO: 3679 - DNA, 24 bp, Homo sapiens
  source 1..24: mol_type = other DNA
tagtagaaaaccagatgagtgtgg

SEQ ID NO: 3680 - DNA, 23 bp, Homo sapiens
  source 1..23: mol_type = other DNA
tataggaaaactagagaggatgg

SEQ ID NO: 3681 - DNA, 23 bp, Homo sapiens
  source 1..23: mol_type = other DNA
tatctggaaagcagtgagtatag

SEQ ID NO: 3682 - DNA, 23 bp, Homo sapiens
  source 1..23: mol_type = other DNA
tataggaatgcctgtgattttgg

SEQ ID NO: 3683 - DNA, 23 bp, Homo sapiens
  source 1..23: mol_type = other DNA
tatgagaaaactagtgagtggca

SEQ ID NO: 3684 - DNA, 23 bp, Homo sapiens
  source 1..23: mol_type = other DNA
tatagggaaatgagtgaatcagg

SEQ ID NO: 3685 - DNA, 22 bp, Homo sapiens
  source 1..22: mol_type = other DNA
tataggaaacaagtgagtgcaa

SEQ ID NO: 3686 - DNA, 22 bp, Homo sapiens
  source 1..22: mol_type = other DNA
tgaagggaaaccatgaatcagg

SEQ ID NO: 3687 - DNA, 22 bp, Homo sapiens
  source 1..22: mol_type = other DNA
aatagaagaaccagtggtgtgg

SEQ ID NO: 3688 - DNA, 23 bp, Homo sapiens
  source 1..23: mol_type = other DNA
tttatgataacctgggactctgg

SEQ ID NO: 3689 - DNA, 23 bp, Homo sapiens
  source 1..23: mol_type = other DNA
tatagaaaccccactgagtgagg

SEQ ID NO: 3690 - DNA, 23 bp, Homo sapiens
  source 1..23: mol_type = other DNA
gacagaaaaagctgagagtcagg

SEQ ID NO: 3691 - DNA, 23 bp, Homo sapiens
  source 1..23: mol_type = other DNA
tatagtagaaccagtttgtttgt

SEQ ID NO: 3692 - DNA, 23 bp, Homo sapiens
  source 1..23: mol_type = other DNA
tatatgagtaccagtgagctttg

SEQ ID NO: 3693 - DNA, 23 bp, Homo sapiens
  source 1..23: mol_type = other DNA
tagttgaaaagcagtgagctagg

SEQ ID NO: 3694 - DNA, 23 bp, Homo sapiens
  source 1..23: mol_type = other DNA
aatagaaacaccagggagtgctg

SEQ ID NO: 3695 - DNA, 25 bp, Homo sapiens
  source 1..25: mol_type = other DNA
cttaggaaaaccaccatgaatctgg

SEQ ID NO: 3696 - DNA, 22 bp, Homo sapiens
  source 1..22: mol_type = other DNA
tatagaaatcccatgagtctgg

SEQ ID NO: 3697 - DNA, 22 bp, Homo sapiens
  source 1..22: mol_type = other DNA
tataggaaaccagtgaaacctg

SEQ ID NO: 3698 - DNA, 22 bp, Homo sapiens
  source 1..22: mol_type = other DNA
tataggtaaacagtgtgtcatg

SEQ ID NO: 3699 - DNA, 22 bp, Homo sapiens
  source 1..22: mol_type = other DNA
tataggaaaacaggaattcagg

SEQ ID NO: 3700 - DNA, 21 bp, Homo sapiens
  source 1..21: mol_type = other DNA
gagaggaaaaacagtgacagg

SEQ ID NO: 3701 - DNA, 23 bp, Homo sapiens
  source 1..23: mol_type = other DNA
tatataataaccagtgaacatgg

SEQ ID NO: 3702 - DNA, 23 bp, Homo sapiens
  source 1..23: mol_type = other DNA
aatagtaaaatcagtgactattg

SEQ ID NO: 3703 - DNA, 23 bp, Homo sapiens
  source 1..23: mol_type = other DNA
attaggagacctagagagtcagg

SEQ ID NO: 3704 - DNA, 23 bp, Homo sapiens
  source 1..23: mol_type = other DNA
tataaggataccagtcagattgg

SEQ ID NO: 3705 - DNA, 23 bp, Homo sapiens
  source 1..23: mol_type = other DNA
tatagtaaaaggagaaattcagg

SEQ ID NO: 3706 - DNA, 23 bp, Homo sapiens
  source 1..23: mol_type = other DNA
tgtaggaaaaccattgaagaggt

SEQ ID NO: 3707 - DNA, 23 bp, Homo sapiens
  source 1..23: mol_type = other DNA
taaagcaaaaacagtgtttcatg

SEQ ID NO: 3708 - DNA, 23 bp, Homo sapiens
  source 1..23: mol_type = other DNA
tataggatagccagtaagtaata

SEQ ID NO: 3709 - DNA, 22 bp, Homo sapiens
  source 1..22: mol_type = other DNA
tgtggaaaaactgtgagtctgc

SEQ ID NO: 3710 - DNA, 22 bp, Homo sapiens
  source 1..22: mol_type = other DNA
tatacaaaaatagtgagtcagg

SEQ ID NO: 3711 - DNA, 22 bp, Homo sapiens
  source 1..22: mol_type = other DNA
tatagaatacatgtgagtgggg

SEQ ID NO: 3712 - DNA, 22 bp, Homo sapiens
  source 1..22: mol_type = other DNA
aataggaaaaacaggagaaagg

SEQ ID NO: 3713 - DNA, 22 bp, Homo sapiens
  source 1..22: mol_type = other DNA
aataagaaaaccagtagtctgt

SEQ ID NO: 3714 - DNA, 21 bp, Homo sapiens
  source 1..21: mol_type = other DNA
tatagtaaaacctgagaaagg

SEQ ID NO: 3715 - DNA, 21 bp, Homo sapiens
  source 1..21: mol_type = other DNA
tataggagtcagtgagtccag

SEQ ID NO: 3716 - DNA, 23 bp, Homo sapiens
  source 1..23: mol_type = other DNA
tatatgaaaaaccatgtgtcagg

SEQ ID NO: 3717 - DNA, 21 bp, Homo sapiens
  source 1..21: mol_type = other DNA
tgcaggaaagccagtgtctgg

SEQ ID NO: 3718 - DNA, 23 bp, Homo sapiens
  source 1..23: mol_type = other DNA
tatagataaaccagtgagaactt

SEQ ID NO: 3719 - DNA, 23 bp, Homo sapiens
  source 1..23: mol_type = other DNA
ttttaggagatcagtgagtcagg

SEQ ID NO: 3720 - DNA, 22 bp, Homo sapiens
  source 1..22: mol_type = other DNA
tttaggaataccatgactcagg

SEQ ID NO: 3721 - DNA, 23 bp, Homo sapiens
  source 1..23: mol_type = other DNA
tacaggaaaaccaaagagtctag

SEQ ID NO: 3722 - DNA, 23 bp, Homo sapiens
  source 1..23: mol_type = other DNA
tataggggcaccagtgaagttgg

SEQ ID NO: 3723 - DNA, 23 bp, Homo sapiens
  source 1..23: mol_type = other DNA
tataaggtgaccagtgagtctgc

SEQ ID NO: 3724 - DNA, 23 bp, Homo sapiens
  source 1..23: mol_type = other DNA
taaaagtaaaccagtgggtgggc

SEQ ID NO: 3725 - DNA, 23 bp, Homo sapiens
  source 1..23: mol_type = other DNA
tataacataaccaataggtcagg

SEQ ID NO: 3726 - DNA, 23 bp, Homo sapiens
  source 1..23: mol_type = other DNA
tactcacctctacatgctcagtg

SEQ ID NO: 3727 - DNA, 22 bp, Homo sapiens
  source 1..22: mol_type = other DNA
tactcaccctgcatacttctgg

SEQ ID NO: 3728 - DNA, 23 bp, Homo sapiens
  source 1..23: mol_type = other DNA
acctcaccactgcatgctctggg

SEQ ID NO: 3729 - DNA, 23 bp, Homo sapiens
  source 1..23: mol_type = other DNA
cactcatctctgcatattcatgg

SEQ ID NO: 3730 - DNA, 22 bp, Homo sapiens
  source 1..22: mol_type = other DNA
ctctcacctctcatactcaggg

SEQ ID NO: 3731 - DNA, 21 bp, Homo sapiens
  source 1..21: mol_type = other DNA
tactcacttgtatgctctagg

SEQ ID NO: 3732 - DNA, 23 bp, Homo sapiens
  source 1..23: mol_type = other DNA
ctctcacctccacatgcccgtgg

SEQ ID NO: 3733 - DNA, 23 bp, Homo sapiens
  source 1..23: mol_type = other DNA
ccctcacctccacatgttcaagg

SEQ ID NO: 3734 - DNA, 22 bp, Homo sapiens
  source 1..22: mol_type = other DNA
tactccatctgcatgttcacgg

SEQ ID NO: 3735 - DNA, 23 bp, Homo sapiens
  source 1..23: mol_type = other DNA
tcctcacctccacatgctccctg

SEQ ID NO: 3736 - DNA, 22 bp, Homo sapiens
  source 1..22: mol_type = other DNA
aactcaccctgcatctccaagg

SEQ ID NO: 3737 - DNA, 23 bp, Homo sapiens
  source 1..23: mol_type = other DNA
tctgtacctctgcatactccagg

SEQ ID NO: 3738 - DNA, 22 bp, Homo sapiens
  source 1..22: mol_type = other DNA
tgtttacctctgcatcccatgg

SEQ ID NO: 3739 - DNA, 24 bp, Homo sapiens
  source 1..24: mol_type = other DNA
acctcacctctaccatgcccaagg

SEQ ID NO: 3740 - DNA, 22 bp, Homo sapiens
  source 1..22: mol_type = other DNA
cacccaccctgcatactcagag

SEQ ID NO: 3741 - DNA, 23 bp, Homo sapiens
  source 1..23: mol_type = other DNA
tactcaaccccacttgctcaggg

SEQ ID NO: 3742 - DNA, 23 bp, Homo sapiens
  source 1..23: mol_type = other DNA
gacctcactctgcatgcccaagg

SEQ ID NO: 3743 - DNA, 23 bp, Homo sapiens
  source 1..23: mol_type = other DNA
ctttcacctctccatgctaatgg

SEQ ID NO: 3744 - DNA, 21 bp, Homo sapiens
  source 1..21: mol_type = other DNA
tactcaattacatgctcatgg

SEQ ID NO: 3745 - DNA, 22 bp, Homo sapiens
  source 1..22: mol_type = other DNA
taaccacctctgctgctcttgg

SEQ ID NO: 3746 - DNA, 22 bp, Homo sapiens
  source 1..22: mol_type = other DNA
tactctctaagcatgctcaagg

SEQ ID NO: 3747 - DNA, 23 bp, Homo sapiens
  source 1..23: mol_type = other DNA
tctttatttctgcatgctcaatg

SEQ ID NO: 3748 - DNA, 23 bp, Homo sapiens
  source 1..23: mol_type = other DNA
gcctttcatctgcatgctcacag

SEQ ID NO: 3749 - DNA, 23 bp, Homo sapiens
  source 1..23: mol_type = other DNA
cactctgatatgcatgctcttgg

SEQ ID NO: 3750 - DNA, 22 bp, Homo sapiens
  source 1..22: mol_type = other DNA
tttccacctctgcatctcgagg

SEQ ID NO: 3751 - DNA, 23 bp, Homo sapiens
  source 1..23: mol_type = other DNA
ttctgtactctgcatgctcagaa

SEQ ID NO: 3752 - DNA, 24 bp, Homo sapiens
  source 1..24: mol_type = other DNA
tactcacctctatcatgttcatgg

SEQ ID NO: 3753 - DNA, 22 bp, Homo sapiens
  source 1..22: mol_type = other DNA
tgctccatctgcatactcacag

SEQ ID NO: 3754 - DNA, 23 bp, Homo sapiens
  source 1..23: mol_type = other DNA
cagacacctcagcatgctcgtgg

SEQ ID NO: 3755 - DNA, 22 bp, Homo sapiens
  source 1..22: mol_type = other DNA
cacccacctcagcatctcagag

SEQ ID NO: 3756 - DNA, 22 bp, Homo sapiens
  source 1..22: mol_type = other DNA
tactccctctgcatgctcacgt

SEQ ID NO: 3757 - DNA, 21 bp, Homo sapiens
  source 1..21: mol_type = other DNA
tacccacctgcatgctagagg

SEQ ID NO: 3758 - DNA, 22 bp, Homo sapiens
  source 1..22: mol_type = other DNA
tgatacctctgcatgaacacgg

SEQ ID NO: 3759 - DNA, 22 bp, Homo sapiens
  source 1..22: mol_type = other DNA
ttatacctctgcatcctcatag

SEQ ID NO: 3760 - DNA, 22 bp, Homo sapiens
  source 1..22: mol_type = other DNA
caaccaccctgcatgctcttgg

SEQ ID NO: 3761 - DNA, 23 bp, Homo sapiens
  source 1..23: mol_type = other DNA
tactctcacttgcatgcttaggg

SEQ ID NO: 3762 - DNA, 24 bp, Homo sapiens
  source 1..24: mol_type = other DNA
taggcacatactgtatgctcatgg

SEQ ID NO: 3763 - DNA, 23 bp, Homo sapiens
  source 1..23: mol_type = other DNA
gtctctactctgcaggctcaggg

SEQ ID NO: 3764 - DNA, 22 bp, Homo sapiens
  source 1..22: mol_type = other DNA
taaacacatcccatgctcatgg

SEQ ID NO: 3765 - DNA, 22 bp, Homo sapiens
  source 1..22: mol_type = other DNA
tacacaccttacacgcccacgg

SEQ ID NO: 3766 - DNA, 24 bp, Homo sapiens
  source 1..24: mol_type = other DNA
tactcacctcagcaatgatcaggg

SEQ ID NO: 3767 - DNA, 23 bp, Homo sapiens
  source 1..23: mol_type = other DNA
ctcttacctttgcatgctcagtg

SEQ ID NO: 3768 - DNA, 22 bp, Homo sapiens
  source 1..22: mol_type = other DNA
ccctcacctctgcatttcctgg

SEQ ID NO: 3769 - DNA, 22 bp, Homo sapiens
  source 1..22: mol_type = other DNA
tacacaccctgcatggtaacgg

SEQ ID NO: 3770 - DNA, 23 bp, Homo sapiens
  source 1..23: mol_type = other DNA
caagcaccactgcaggctcaggg

SEQ ID NO: 3771 - DNA, 21 bp, Homo sapiens
  source 1..21: mol_type = other DNA
tacacttcaacatgctcatgg

SEQ ID NO: 3772 - DNA, 23 bp, Homo sapiens
  source 1..23: mol_type = other DNA
ttctcacccctacatgttcttgg

SEQ ID NO: 3773 - DNA, 22 bp, Homo sapiens
  source 1..22: mol_type = other DNA
cacttaacctgcatgcttaagg

SEQ ID NO: 3774 - DNA, 22 bp, Homo sapiens
  source 1..22: mol_type = other DNA
gaaacacatctcatgctcatgg

SEQ ID NO: 3775 - DNA, 23 bp, Homo sapiens
  source 1..23: mol_type = other DNA
cactactctcaccatgctcaagg

SEQ ID NO: 3776 - DNA, 22 bp, Homo sapiens
  source 1..22: mol_type = other DNA
gactcacccttcatgcccaagg

SEQ ID NO: 3777 - DNA, 22 bp, Homo sapiens
  source 1..22: mol_type = other DNA
ttctcaccctgtattctcatgg

SEQ ID NO: 3778 - DNA, 23 bp, Homo sapiens
  source 1..23: mol_type = other DNA
tcctcacctctgcattcagtggc

SEQ ID NO: 3779 - DNA, 23 bp, Homo sapiens
  source 1..23: mol_type = other DNA
gcctcatctctgcaagctcaggg

SEQ ID NO: 3780 - DNA, 21 bp, Homo sapiens
  source 1..21: mol_type = other DNA
gaatcatctacatgctcaggg

SEQ ID NO: 3781 - DNA, 23 bp, Homo sapiens
  source 1..23: mol_type = other DNA
accacaactcagcatgctcaggg

SEQ ID NO: 3782 - DNA, 23 bp, Homo sapiens
  source 1..23: mol_type = other DNA
tgcacacacacgcatgctcatgg

SEQ ID NO: 3783 - DNA, 23 bp, Homo sapiens
  source 1..23: mol_type = other DNA
agctcagctctgcaagctcatgg

SEQ ID NO: 3784 - DNA, 22 bp, Homo sapiens
  source 1..22: mol_type = other DNA
caccaccccagcatgcccaggg

SEQ ID NO: 3785 - DNA, 22 bp, Homo sapiens
  source 1..22: mol_type = other DNA
gaataccttggcatgctcaagg

SEQ ID NO: 3786 - DNA, 23 bp, Homo sapiens
  source 1..23: mol_type = other DNA
ttataaacactgcatgctcaggc

SEQ ID NO: 3787 - DNA, 22 bp, Homo sapiens
  source 1..22: mol_type = other DNA
gactaacattccatgctcacgg

SEQ ID NO: 3788 - DNA, 24 bp, Homo sapiens
  source 1..24: mol_type = other DNA
tactctaccgttgcatgccctggg

SEQ ID NO: 3789 - DNA, 23 bp, Homo sapiens
  source 1..23: mol_type = other DNA
tacacacctatgtatgctcatgc

SEQ ID NO: 3790 - DNA, 23 bp, Homo sapiens
  source 1..23: mol_type = other DNA
caccaacatatgcatgcccacgg

SEQ ID NO: 3791 - DNA, 22 bp, Homo sapiens
  source 1..22: mol_type = other DNA
tctacacttctgctgctcatgg

SEQ ID NO: 3792 - DNA, 22 bp, Homo sapiens
  source 1..22: mol_type = other DNA
ttatcatctctgcatctccggg

SEQ ID NO: 3793 - DNA, 23 bp, Homo sapiens
  source 1..23: mol_type = other DNA
tatacatatctgcatgctcattt

SEQ ID NO: 3794 - DNA, 23 bp, Homo sapiens
  source 1..23: mol_type = other DNA
ttcttccatctgcatgctttggg

SEQ ID NO: 3795 - DNA, 22 bp, Homo sapiens
  source 1..22: mol_type = other DNA
atctcacatctcatgttcatgg

SEQ ID NO: 3796 - DNA, 23 bp, Homo sapiens
  source 1..23: mol_type = other DNA
tgttcacctctgcatctccaaga

SEQ ID NO: 3797 - DNA, 22 bp, Homo sapiens
  source 1..22: mol_type = other DNA
aactcagctctgcatcacatgg

SEQ ID NO: 3798 - DNA, 23 bp, Homo sapiens
  source 1..23: mol_type = other DNA
tgctcaccactgcatgccactag

SEQ ID NO: 3799 - DNA, 23 bp, Homo sapiens
  source 1..23: mol_type = other DNA
tattcacctctgcatcccacatg

SEQ ID NO: 3800 - DNA, 21 bp, Homo sapiens
  source 1..21: mol_type = other DNA
tgctcatctccatgcccaggg

SEQ ID NO: 3801 - DNA, 23 bp, Homo sapiens
  source 1..23: mol_type = other DNA
taatttcctctgcatactcctgg

SEQ ID NO: 3802 - DNA, 23 bp, Homo sapiens
  source 1..23: mol_type = other DNA
tgatgttctctgcatgctccagg

SEQ ID NO: 3803 - DNA, 24 bp, Homo sapiens
  source 1..24: mol_type = other DNA
tgcaaagcctctgcatgctccagg

SEQ ID NO: 3804 - DNA, 22 bp, Homo sapiens
  source 1..22: mol_type = other DNA
tccgaaccctgcatgctcagag

SEQ ID NO: 3805 - DNA, 22 bp, Homo sapiens
  source 1..22: mol_type = other DNA
tcttgaccttgcatgctcatgg

SEQ ID NO: 3806 - DNA, 22 bp, Homo sapiens
  source 1..22: mol_type = other DNA
gaaaaaccttgcatgctcatgg

SEQ ID NO: 3807 - DNA, 23 bp, Homo sapiens
  source 1..23: mol_type = other DNA
tttgatcctttgcatgctcaggg

SEQ ID NO: 3808 - DNA, 21 bp, Homo sapiens
  source 1..21: mol_type = other DNA
ttcttacctgtatgctcaggg

SEQ ID NO: 3809 - DNA, 21 bp, Homo sapiens
  source 1..21: mol_type = other DNA
gactcctcagcatgctcagtg

SEQ ID NO: 3810 - DNA, 23 bp, Homo sapiens
  source 1..23: mol_type = other DNA
cagtgaactctgcatactccagg

SEQ ID NO: 3811 - DNA, 23 bp, Homo sapiens
  source 1..23: mol_type = other DNA
tgttggccactgcaagctcaggg

SEQ ID NO: 3812 - DNA, 21 bp, Homo sapiens
  source 1..21: mol_type = other DNA
tactcaactgtaagctcaagg

SEQ ID NO: 3813 - DNA, 23 bp, Homo sapiens
  source 1..23: mol_type = other DNA
ccctcagtgctgcatgctccagg

SEQ ID NO: 3814 - DNA, 24 bp, Homo sapiens
  source 1..24: mol_type = other DNA
tactactctcgtacatgctcaggg

SEQ ID NO: 3815 - DNA, 23 bp, Homo sapiens
  source 1..23: mol_type = other DNA
catacacctttgcatgctcaggt

SEQ ID NO: 3816 - DNA, 23 bp, Homo sapiens
  source 1..23: mol_type = other DNA
ttctcacctctacatcttcttgg

SEQ ID NO: 3817 - DNA, 23 bp, Homo sapiens
  source 1..23: mol_type = other DNA
ctgtcaccactgtatcctcaggg

SEQ ID NO: 3818 - DNA, 23 bp, Homo sapiens
  source 1..23: mol_type = other DNA
ccctgacctctgcatcctcaggg

SEQ ID NO: 3819 - DNA, 21 bp, Homo sapiens
  source 1..21: mol_type = other DNA
tcctcatctccatgctcagag

SEQ ID NO: 3820 - DNA, 23 bp, Homo sapiens
  source 1..23: mol_type = other DNA
tagtcacctctgcatgttaaagt

SEQ ID NO: 3821 - DNA, 24 bp, Homo sapiens
  source 1..24: mol_type = other DNA
tcatcacctctaacatgctcaagg

SEQ ID NO: 3822 - DNA, 22 bp, Homo sapiens
  source 1..22: mol_type = other DNA
tcttcatctctgcatcccatgg

SEQ ID NO: 3823 - DNA, 23 bp, Homo sapiens
  source 1..23: mol_type = other DNA
cacccacctctgcatgctggaga

SEQ ID NO: 3824 - DNA, 23 bp, Homo sapiens
  source 1..23: mol_type = other DNA
aaattgactatgcatgctcaggg

SEQ ID NO: 3825 - DNA, 22 bp, Homo sapiens
  source 1..22: mol_type = other DNA
aaatgacatctcatgctcatgg

SEQ ID NO: 3826 - DNA, 22 bp, Homo sapiens
  source 1..22: mol_type = other DNA
tcccaaccttgcatgcccaggg

SEQ ID NO: 3827 - DNA, 22 bp, Homo sapiens
  source 1..22: mol_type = other DNA
tacacaccacacatgctcatgc

SEQ ID NO: 3828 - DNA, 23 bp, Homo sapiens
  source 1..23: mol_type = other DNA
tacgcaccactgcaggctctgag

SEQ ID NO: 3829 - DNA, 23 bp, Homo sapiens
  source 1..23: mol_type = other DNA
tacagatatgtgcatgctcaggg

SEQ ID NO: 3830 - DNA, 23 bp, Homo sapiens
  source 1..23: mol_type = other DNA
cactcacctcaccaggctctagg

SEQ ID NO: 3831 - DNA, 22 bp, Homo sapiens
  source 1..22: mol_type = other DNA
ttcacacatctgctgctctagg

SEQ ID NO: 3832 - DNA, 23 bp, Homo sapiens
  source 1..23: mol_type = other DNA
tacaggcatgtgcaagctcatgg

SEQ ID NO: 3833 - DNA, 23 bp, Homo sapiens
  source 1..23: mol_type = other DNA
taaaaaacacttcatgctcatgg

SEQ ID NO: 3834 - DNA, 23 bp, Homo sapiens
  source 1..23: mol_type = other DNA
tccactcctctgcatgctctttc

SEQ ID NO: 3835 - DNA, 24 bp, Homo sapiens
  source 1..24: mol_type = other DNA
tattcacctctgcagtgctctgag

SEQ ID NO: 3836 - DNA, 23 bp, Homo sapiens
  source 1..23: mol_type = other DNA
tactgacttctacaagctcacaa

SEQ ID NO: 3837 - DNA, 23 bp, Homo sapiens
  source 1..23: mol_type = other DNA
tactctcttgtgcatgcacacga

SEQ ID NO: 3838 - DNA, 23 bp, Homo sapiens
  source 1..23: mol_type = other DNA
aactcacccctgcctggtccatg

SEQ ID NO: 3839 - DNA, 22 bp, Homo sapiens
  source 1..22: mol_type = other DNA
gtctcaccacagatgctcaagg

SEQ ID NO: 3840 - DNA, 23 bp, Homo sapiens
  source 1..23: mol_type = other DNA
gactcagccctgcatgtgcaggg

SEQ ID NO: 3841 - DNA, 23 bp, Homo sapiens
  source 1..23: mol_type = other DNA
ccctaatcactgcaggctcaggg

SEQ ID NO: 3842 - DNA, 23 bp, Homo sapiens
  source 1..23: mol_type = other DNA
cagttacctctgcatgccctgag

SEQ ID NO: 3843 - DNA, 23 bp, Homo sapiens
  source 1..23: mol_type = other DNA
taatcatctctgcatgaacagtt

SEQ ID NO: 3844 - DNA, 23 bp, Homo sapiens
  source 1..23: mol_type = other DNA
tgcccacctctgcaacctctcgg

SEQ ID NO: 3845 - DNA, 24 bp, Homo sapiens
  source 1..24: mol_type = other DNA
tcagcaccttctccatgctcatgg

SEQ ID NO: 3846 - DNA, 24 bp, Homo sapiens
  source 1..24: mol_type = other DNA
tcatcacctctgctgtgctctagg

SEQ ID NO: 3847 - DNA, 22 bp, Homo sapiens
  source 1..22: mol_type = other DNA
ggctcaccctgcaggctctagg

SEQ ID NO: 3848 - DNA, 22 bp, Homo sapiens
  source 1..22: mol_type = other DNA
tactcagccagaatgctcagcg

SEQ ID NO: 3849 - DNA, 22 bp, Homo sapiens
  source 1..22: mol_type = other DNA
taccacctatgtttgctcaagg

SEQ ID NO: 3850 - DNA, 23 bp, Homo sapiens
  source 1..23: mol_type = other DNA
cactcaccacagctggcacaggg

SEQ ID NO: 3851 - DNA, 22 bp, Homo sapiens
  source 1..22: mol_type = other DNA
ttccacctctggatgcccatag

SEQ ID NO: 3852 - DNA, 22 bp, Homo sapiens
  source 1..22: mol_type = other DNA
tgctcaccctctatgctcaggg

SEQ ID NO: 3853 - DNA, 22 bp, Homo sapiens
  source 1..22: mol_type = other DNA
tactcacattgcatgtgtatgg

SEQ ID NO: 3854 - DNA, 22 bp, Homo sapiens
  source 1..22: mol_type = other DNA
tactacctctgcatgtctatag

SEQ ID NO: 3855 - DNA, 22 bp, Homo sapiens
  source 1..22: mol_type = other DNA
ttattacccctgcagctcaggg

SEQ ID NO: 3856 - DNA, 22 bp, Homo sapiens
  source 1..22: mol_type = other DNA
cgctcacctctgcataccatag

SEQ ID NO: 3857 - DNA, 23 bp, Homo sapiens
  source 1..23: mol_type = other DNA
aactctgctatgcatgcccaaga

SEQ ID NO: 3858 - DNA, 23 bp, Homo sapiens
  source 1..23: mol_type = other DNA
cattcacatcagcatgttcatgc

SEQ ID NO: 3859 - DNA, 23 bp, Homo sapiens
  source 1..23: mol_type = other DNA
taatcacccctatatgctcatag

SEQ ID NO: 3860 - DNA, 22 bp, Homo sapiens
  source 1..22: mol_type = other DNA
taaacacattccatgctcatgg

SEQ ID NO: 3861 - DNA, 23 bp, Homo sapiens
  source 1..23: mol_type = other DNA
tgcacacacatgcatgcacatgg

SEQ ID NO: 3862 - DNA, 23 bp, Homo sapiens
  source 1..23: mol_type = other DNA
tactcacctcttcaagcccccac

SEQ ID NO: 3863 - DNA, 23 bp, Homo sapiens
  source 1..23: mol_type = other DNA
caagcacctctgccagctccagg

SEQ ID NO: 3864 - DNA, 23 bp, Homo sapiens
  source 1..23: mol_type = other DNA
gactcacccctgcctgcttctgg

SEQ ID NO: 3865 - DNA, 22 bp, Homo sapiens
  source 1..22: mol_type = other DNA
aactcatctctgctgctctctg

SEQ ID NO: 3866 - DNA, 23 bp, Homo sapiens
  source 1..23: mol_type = other DNA
tcctcatatatacaggctcacgg

SEQ ID NO: 3867 - DNA, 23 bp, Homo sapiens
  source 1..23: mol_type = other DNA
tattcatctttgcattcccagag

SEQ ID NO: 3868 - DNA, 23 bp, Homo sapiens
  source 1..23: mol_type = other DNA
tccttagctctgcatgccccggc

SEQ ID NO: 3869 - DNA, 22 bp, Homo sapiens
  source 1..22: mol_type = other DNA
tgctcacctcccaagcacaagg

SEQ ID NO: 3870 - DNA, 22 bp, Homo sapiens
  source 1..22: mol_type = other DNA
tacccacccctgcagctttggg

SEQ ID NO: 3871 - DNA, 22 bp, Homo sapiens
  source 1..22: mol_type = other DNA
tagtcaccacagcctgccatgg

SEQ ID NO: 3872 - DNA, 22 bp, Homo sapiens
  source 1..22: mol_type = other DNA
atcacacctctgcaggctaggg

SEQ ID NO: 3873 - DNA, 21 bp, Homo sapiens
  source 1..21: mol_type = other DNA
tactcaccttccagctcaggg

SEQ ID NO: 3874 - DNA, 23 bp, Homo sapiens
  source 1..23: mol_type = other DNA
tactcccctaagctggctcctgg

SEQ ID NO: 3875 - DNA, 23 bp, Homo sapiens
  source 1..23: mol_type = other DNA
cattcacctctgcctgccctttg

SEQ ID NO: 3876 - DNA, 23 bp, Homo sapiens
  source 1..23: mol_type = other DNA
cacccacctcagccttctgaagg

SEQ ID NO: 3877 - DNA, 23 bp, Homo sapiens
  source 1..23: mol_type = other DNA
tattcatctctgcgtacccagtg

SEQ ID NO: 3878 - DNA, 22 bp, Homo sapiens
  source 1..22: mol_type = other DNA
taaacacccctgctgctccagg

SEQ ID NO: 3879 - DNA, 22 bp, Homo sapiens
  source 1..22: mol_type = other DNA
ttctcacctgttcatgtcatgg

SEQ ID NO: 3880 - DNA, 21 bp, Homo sapiens
  source 1..21: mol_type = other DNA
ttatcacctcagcattcatgg

SEQ ID NO: 3881 - DNA, 22 bp, Homo sapiens
  source 1..22: mol_type = other DNA
ctctaacctctgatgcacaggg

SEQ ID NO: 3882 - DNA, 21 bp, Homo sapiens
  source 1..21: mol_type = other DNA
ttctcacctgcatgctcataa

SEQ ID NO: 3883 - DNA, 23 bp, Homo sapiens
  source 1..23: mol_type = other DNA
tacagacttccgcatgcttactg

SEQ ID NO: 3884 - DNA, 23 bp, Homo sapiens
  source 1..23: mol_type = other DNA
tactctcctccacattctctcag

SEQ ID NO: 3885 - DNA, 23 bp, Homo sapiens
  source 1..23: mol_type = other DNA
aactcatctcggcatacccagtg

SEQ ID NO: 3886 - DNA, 23 bp, Homo sapiens
  source 1..23: mol_type = other DNA
tccttacctctccatgctatggt

SEQ ID NO: 3887 - DNA, 24 bp, Homo sapiens
  source 1..24: mol_type = other DNA
gactaagcccctgcaggctcaggg

SEQ ID NO: 3888 - DNA, 25 bp, Homo sapiens
  source 1..25: mol_type = other DNA
tccacacctccctgcaagctgaggg

SEQ ID NO: 3889 - DNA, 22 bp, Homo sapiens
  source 1..22: mol_type = other DNA
aactcacccctgctgattaggg

SEQ ID NO: 3890 - DNA, 22 bp, Homo sapiens
  source 1..22: mol_type = other DNA
tacgacctatgtttgctcaagg

SEQ ID NO: 3891 - DNA, 22 bp, Homo sapiens
  source 1..22: mol_type = other DNA
tactcagctctgctgatgagga

SEQ ID NO: 3892 - DNA, 23 bp, Homo sapiens
  source 1..23: mol_type = other DNA
tattcacctctgcacccccatcc

SEQ ID NO: 3893 - DNA, 23 bp, Homo sapiens
  source 1..23: mol_type = other DNA
tacttactccttcatgggcaagg

SEQ ID NO: 3894 - DNA, 22 bp, Homo sapiens
  source 1..22: mol_type = other DNA
tagtcacttctcccgctcaggg

SEQ ID NO: 3895 - DNA, 21 bp, Homo sapiens
  source 1..21: mol_type = other DNA
tactcatctatgcatgcattg

SEQ ID NO: 3896 - DNA, 24 bp, Homo sapiens
  source 1..24: mol_type = other DNA
tactcacacaccacatgctcacag

SEQ ID NO: 3897 - DNA, 22 bp, Homo sapiens
  source 1..22: mol_type = other DNA
tgctcaccctgcatgctcagtg

SEQ ID NO: 3898 - DNA, 22 bp, Homo sapiens
  source 1..22: mol_type = other DNA
tactacctatgcatgcccaagg

SEQ ID NO: 3899 - DNA, 23 bp, Homo sapiens
  source 1..23: mol_type = other DNA
tactcaccacagcatgtccaggg

SEQ ID NO: 3900 - DNA, 22 bp, Homo sapiens
  source 1..22: mol_type = other DNA
cactcatctcccatgctcaggg

SEQ ID NO: 3901 - DNA, 22 bp, Homo sapiens
  source 1..22: mol_type = other DNA
ccttcacctctgcatgtcaaga

SEQ ID NO: 3902 - DNA, 21 bp, Homo sapiens
  source 1..21: mol_type = other DNA
tactcaccagcatgatcatgg

SEQ ID NO: 3903 - DNA, 22 bp, Homo sapiens
  source 1..22: mol_type = other DNA
tatatacctctgctgttcaagg

SEQ ID NO: 3904 - DNA, 23 bp, Homo sapiens
  source 1..23: mol_type = other DNA
atgtctactctgcatgctcttgg

SEQ ID NO: 3905 - DNA, 23 bp, Homo sapiens
  source 1..23: mol_type = other DNA
tactcacacatgcatactcaaga

SEQ ID NO: 3906 - DNA, 23 bp, Homo sapiens
  source 1..23: mol_type = other DNA
catacacatctgcatgctcatgg

SEQ ID NO: 3907 - DNA, 22 bp, Homo sapiens
  source 1..22: mol_type = other DNA
aactcaccctgtatgctatagg

SEQ ID NO: 3908 - DNA, 23 bp, Homo sapiens
  source 1..23: mol_type = other DNA
tcataatatttgcatgctcaggg

SEQ ID NO: 3909 - DNA, 22 bp, Homo sapiens
  source 1..22: mol_type = other DNA
tactcactctccatgttcttgg

SEQ ID NO: 3910 - DNA, 23 bp, Homo sapiens
  source 1..23: mol_type = other DNA
tggccacctatgcatgttcaagg

SEQ ID NO: 3911 - DNA, 23 bp, Homo sapiens
  source 1..23: mol_type = other DNA
tatcttctactgcatgctcatgg

SEQ ID NO: 3912 - DNA, 22 bp, Homo sapiens
  source 1..22: mol_type = other DNA
ttttcacctctgctgctctttg

SEQ ID NO: 3913 - DNA, 23 bp, Homo sapiens
  source 1..23: mol_type = other DNA
tccacaccactgcatgcaccagg

SEQ ID NO: 3914 - DNA, 23 bp, Homo sapiens
  source 1..23: mol_type = other DNA
tacacattcatgcatgctcagag

SEQ ID NO: 3915 - DNA, 22 bp, Homo sapiens
  source 1..22: mol_type = other DNA
gaaacacctctcatgctcatgg

SEQ ID NO: 3916 - DNA, 23 bp, Homo sapiens
  source 1..23: mol_type = other DNA
gcctcacctctgcataatcatgg

SEQ ID NO: 3917 - DNA, 23 bp, Homo sapiens
  source 1..23: mol_type = other DNA
ttttcttatctgcatgctccagg

SEQ ID NO: 3918 - DNA, 22 bp, Homo sapiens
  source 1..22: mol_type = other DNA
tactcagtttacatgcttaggg

SEQ ID NO: 3919 - DNA, 23 bp, Homo sapiens
  source 1..23: mol_type = other DNA
tccttaatactgcatgctgaggg

SEQ ID NO: 3920 - DNA, 22 bp, Homo sapiens
  source 1..22: mol_type = other DNA
ggctcacctctgcagctcttag

SEQ ID NO: 3921 - DNA, 23 bp, Homo sapiens
  source 1..23: mol_type = other DNA
tatgatcctctgcatgctcaaag

SEQ ID NO: 3922 - DNA, 23 bp, Homo sapiens
  source 1..23: mol_type = other DNA
cacgcacctatacatgctcatga

SEQ ID NO: 3923 - DNA, 23 bp, Homo sapiens
  source 1..23: mol_type = other DNA
cactcacctcagcctgctccatg

SEQ ID NO: 3924 - DNA, 22 bp, Homo sapiens
  source 1..22: mol_type = other DNA
tattcatctctgcatcccaggg

SEQ ID NO: 3925 - DNA, 21 bp, Homo sapiens
  source 1..21: mol_type = other DNA
tactcacctctgcactaatgg

SEQ ID NO: 3926 - DNA, 23 bp, Homo sapiens
  source 1..23: mol_type = other DNA
tacttacacatgcatgcttacag

SEQ ID NO: 3927 - DNA, 22 bp, Homo sapiens
  source 1..22: mol_type = other DNA
ttcccactctgcatgctccttg

SEQ ID NO: 3928 - DNA, 23 bp, Homo sapiens
  source 1..23: mol_type = other DNA
tactctcccctgcatgctctgag

SEQ ID NO: 3929 - DNA, 23 bp, Homo sapiens
  source 1..23: mol_type = other DNA
ccatcacccctgcatggtcaggg

SEQ ID NO: 3930 - DNA, 21 bp, Homo sapiens
  source 1..21: mol_type = other DNA
taaacatctacatgctcatgg

SEQ ID NO: 3931 - DNA, 23 bp, Homo sapiens
  source 1..23: mol_type = other DNA
taatcattaatgcatgctctagg

SEQ ID NO: 3932 - DNA, 22 bp, Homo sapiens
  source 1..22: mol_type = other DNA
tctccacctctgcagcccatgg

SEQ ID NO: 3933 - DNA, 22 bp, Homo sapiens
  source 1..22: mol_type = other DNA
gaaacacctcccatgctcaggg

SEQ ID NO: 3934 - DNA, 22 bp, Homo sapiens
  source 1..22: mol_type = other DNA
acctcatcctgcatgcttaagg

SEQ ID NO: 3935 - DNA, 22 bp, Homo sapiens
  source 1..22: mol_type = other DNA
ccctcccactgcatgctcgtgg

SEQ ID NO: 3936 - DNA, 23 bp, Homo sapiens
  source 1..23: mol_type = other DNA
gggtgacatctgtatgctcatgg

SEQ ID NO: 3937 - DNA, 21 bp, Homo sapiens
  source 1..21: mol_type = other DNA
tcctcatctgcatgctctggc

SEQ ID NO: 3938 - DNA, 23 bp, Homo sapiens
  source 1..23: mol_type = other DNA
cacacacacctgcatgcttatgg

SEQ ID NO: 3939 - DNA, 22 bp, Homo sapiens
  source 1..22: mol_type = other DNA
tactccccaggcatgctcatgg

SEQ ID NO: 3940 - DNA, 23 bp, Homo sapiens
  source 1..23: mol_type = other DNA
aagccccatctgcatgctcaggc

SEQ ID NO: 3941 - DNA, 23 bp, Homo sapiens
  source 1..23: mol_type = other DNA
gaatatcctttgcatgctcacgg

SEQ ID NO: 3942 - DNA, 22 bp, Homo sapiens
  source 1..22: mol_type = other DNA
aagtcaccactgctgctcatgg

SEQ ID NO: 3943 - DNA, 22 bp, Homo sapiens
  source 1..22: mol_type = other DNA
tggacaccactgcagctcaagg

SEQ ID NO: 3944 - DNA, 24 bp, Homo sapiens
  source 1..24: mol_type = other DNA
tgctaacttactgcatgcttaggg

SEQ ID NO: 3945 - DNA, 23 bp, Homo sapiens
  source 1..23: mol_type = other DNA
tatttgcatatgcatgttcatgg

SEQ ID NO: 3946 - DNA, 22 bp, Homo sapiens
  source 1..22: mol_type = other DNA
tactctacctggatgctcacag

SEQ ID NO: 3947 - DNA, 22 bp, Homo sapiens
  source 1..22: mol_type = other DNA
tgcccaccctgcatgctcactg

SEQ ID NO: 3948 - DNA, 23 bp, Homo sapiens
  source 1..23: mol_type = other DNA
agagcacctcaccatgctcaggg

SEQ ID NO: 3949 - DNA, 22 bp, Homo sapiens
  source 1..22: mol_type = other DNA
cactctctctgcaagctctagg

SEQ ID NO: 3950 - DNA, 23 bp, Homo sapiens
  source 1..23: mol_type = other DNA
tggtcacctctgtatactcaggg

SEQ ID NO: 3951 - DNA, 23 bp, Homo sapiens
  source 1..23: mol_type = other DNA
ccctcactactgcatgctcaggt

SEQ ID NO: 3952 - DNA, 22 bp, Homo sapiens
  source 1..22: mol_type = other DNA
ttgtcacccagcatgctcaatg

SEQ ID NO: 3953 - DNA, 23 bp, Homo sapiens
  source 1..23: mol_type = other DNA
cacacacctctgcacgctcggag

SEQ ID NO: 3954 - DNA, 22 bp, Homo sapiens
  source 1..22: mol_type = other DNA
ctgtcacctctcaagctcacgg

SEQ ID NO: 3955 - DNA, 22 bp, Homo sapiens
  source 1..22: mol_type = other DNA
tccataccctgcttgctcaggg

SEQ ID NO: 3956 - DNA, 23 bp, Homo sapiens
  source 1..23: mol_type = other DNA
tcctatcatctgcatgctcaaca

SEQ ID NO: 3957 - DNA, 23 bp, Homo sapiens
  source 1..23: mol_type = other DNA
tacacacacatgcatgctcatgc

SEQ ID NO: 3958 - DNA, 21 bp, Homo sapiens
  source 1..21: mol_type = other DNA
cattcacctgcatgctcaaag

SEQ ID NO: 3959 - DNA, 23 bp, Homo sapiens
  source 1..23: mol_type = other DNA
ttgtcacctctgcctgctctgag

SEQ ID NO: 3960 - DNA, 22 bp, Homo sapiens
  source 1..22: mol_type = other DNA
tcctcacctctcacgctccagg

SEQ ID NO: 3961 - DNA, 22 bp, Homo sapiens
  source 1..22: mol_type = other DNA
tactcacactgcatgcacaata

SEQ ID NO: 3962 - DNA, 23 bp, Homo sapiens
  source 1..23: mol_type = other DNA
taatgctgactgcatgctcatgg

SEQ ID NO: 3963 - DNA, 23 bp, Homo sapiens
  source 1..23: mol_type = other DNA
tcttcccatctgcatgttcaaag

SEQ ID NO: 3964 - DNA, 23 bp, Homo sapiens
  source 1..23: mol_type = other DNA
tcctttaatttgcatgctcaagg

SEQ ID NO: 3965 - DNA, 22 bp, Homo sapiens
  source 1..22: mol_type = other DNA
tacactactctgcatctcagtg

SEQ ID NO: 3966 - DNA, 22 bp, Homo sapiens
  source 1..22: mol_type = other DNA
gcctcacctctgcatcttagga

SEQ ID NO: 3967 - DNA, 22 bp, Homo sapiens
  source 1..22: mol_type = other DNA
tattcaccgctgcatcccacgg

SEQ ID NO: 3968 - DNA, 22 bp, Homo sapiens
  source 1..22: mol_type = other DNA
tgctcctactgcctgctcatgg

SEQ ID NO: 3969 - DNA, 21 bp, Homo sapiens
  source 1..21: mol_type = other DNA
tactcacctgcttgctcacag

SEQ ID NO: 3970 - DNA, 22 bp, Homo sapiens
  source 1..22: mol_type = other DNA
tcctcaccatgcaggctcaagg

SEQ ID NO: 3971 - DNA, 22 bp, Homo sapiens
  source 1..22: mol_type = other DNA
tattcaccactgcatctcaggc

SEQ ID NO: 3972 - DNA, 23 bp, Homo sapiens
  source 1..23: mol_type = other DNA
tagtcacctctgcatcttcatag

SEQ ID NO: 3973 - DNA, 23 bp, Homo sapiens
  source 1..23: mol_type = other DNA
cacccacctctgcatcccaaagt

SEQ ID NO: 3974 - DNA, 22 bp, Homo sapiens
  source 1..22: mol_type = other DNA
tagtaactctccatgctcatga

SEQ ID NO: 3975 - DNA, 22 bp, Homo sapiens
  source 1..22: mol_type = other DNA
tactcaatctccatgttcatag

SEQ ID NO: 3976 - DNA, 23 bp, Homo sapiens
  source 1..23: mol_type = other DNA
tatatacacctgcatactcatgg

SEQ ID NO: 3977 - DNA, 23 bp, Homo sapiens
  source 1..23: mol_type = other DNA
cagcaacccctgcatgcgcatgg

SEQ ID NO: 3978 - DNA, 23 bp, Homo sapiens
  source 1..23: mol_type = other DNA
ggttgacctctacatgttcatgg

SEQ ID NO: 3979 - DNA, 22 bp, Homo sapiens
  source 1..22: mol_type = other DNA
ttccaccttagcatgctctagg

SEQ ID NO: 3980 - DNA, 23 bp, Homo sapiens
  source 1..23: mol_type = other DNA
acagcacctgtacatgctcaagg

SEQ ID NO: 3981 - DNA, 23 bp, Homo sapiens
  source 1..23: mol_type = other DNA
tcaccacctccacatgctcatgc

SEQ ID NO: 3982 - DNA, 23 bp, Homo sapiens
  source 1..23: mol_type = other DNA
gactcagtcctgcatgctctggg

SEQ ID NO: 3983 - DNA, 23 bp, Homo sapiens
  source 1..23: mol_type = other DNA
tgctcatctctgcatctccaggg

SEQ ID NO: 3984 - DNA, 23 bp, Homo sapiens
  source 1..23: mol_type = other DNA
cagtgacctctgcatgcccctgg

SEQ ID NO: 3985 - DNA, 22 bp, Homo sapiens
  source 1..22: mol_type = other DNA
atgtcacctctcaagctcaggg

SEQ ID NO: 3986 - DNA, 21 bp, Homo sapiens
  source 1..21: mol_type = other DNA
tgcgcacctgcatgctcaggc

SEQ ID NO: 3987 - DNA, 23 bp, Homo sapiens
  source 1..23: mol_type = other DNA
ttctatgttctgcatgctctagg

SEQ ID NO: 3988 - DNA, 22 bp, Homo sapiens
  source 1..22: mol_type = other DNA
tagactctctgcatgctcatgc

SEQ ID NO: 3989 - DNA, 23 bp, Homo sapiens
  source 1..23: mol_type = other DNA
tgttcacctctgtataatcaagg

SEQ ID NO: 3990 - DNA, 22 bp, Homo sapiens
  source 1..22: mol_type = other DNA
gaaacacgtctcatgctcatgg

SEQ ID NO: 3991 - DNA, 23 bp, Homo sapiens
  source 1..23: mol_type = other DNA
tgctcacctctgcaagttctatg

SEQ ID NO: 3992 - DNA, 22 bp, Homo sapiens
  source 1..22: mol_type = other DNA
tacgcatctctgcatgtcaaga

SEQ ID NO: 3993 - DNA, 22 bp, Homo sapiens
  source 1..22: mol_type = other DNA
gactcaccccgcttgctctcgg

SEQ ID NO: 3994 - DNA, 22 bp, Homo sapiens
  source 1..22: mol_type = other DNA
taccacatctacctgctccagg

SEQ ID NO: 3995 - DNA, 23 bp, Homo sapiens
  source 1..23: mol_type = other DNA
cattcacacgtgcatgctcacag

SEQ ID NO: 3996 - DNA, 23 bp, Homo sapiens
  source 1..23: mol_type = other DNA
ccctcacctccacatgtccaagg

SEQ ID NO: 3997 - DNA, 23 bp, Homo sapiens
  source 1..23: mol_type = other DNA
aagtgaactctgcatactctggg

SEQ ID NO: 3998 - DNA, 23 bp, Homo sapiens
  source 1..23: mol_type = other DNA
cactttcatctgcatactcatga

SEQ ID NO: 3999 - DNA, 24 bp, Homo sapiens
  source 1..24: mol_type = other DNA
tctccaccatctgcatgctccagg

SEQ ID NO: 4000 - DNA, 23 bp, Homo sapiens
  source 1..23: mol_type = other DNA
gagtcacctatgcatgctcttag

SEQ ID NO: 4001 - DNA, 22 bp, Homo sapiens
  source 1..22: mol_type = other DNA
aagtcacagtgcatgctcaagg

SEQ ID NO: 4002 - DNA, 22 bp, Homo sapiens
  source 1..22: mol_type = other DNA
tacccaccttgcatgctccaca

SEQ ID NO: 4003 - DNA, 23 bp, Homo sapiens
  source 1..23: mol_type = other DNA
actgcaccactgcatgctcatgt

SEQ ID NO: 4004 - DNA, 23 bp, Homo sapiens
  source 1..23: mol_type = other DNA
tatatacctgagcatgctccagg

SEQ ID NO: 4005 - DNA, 23 bp, Homo sapiens
  source 1..23: mol_type = other DNA
tactcaccactgtctgctctgtg

SEQ ID NO: 4006 - DNA, 22 bp, Homo sapiens
  source 1..22: mol_type = other DNA
gaaacaccttccatgctcatgg

SEQ ID NO: 4007 - DNA, 22 bp, Homo sapiens
  source 1..22: mol_type = other DNA
ccctcacctctcatgttcctgg

SEQ ID NO: 4008 - DNA, 23 bp, Homo sapiens
  source 1..23: mol_type = other DNA
acctctccactgcatgctaagga

SEQ ID NO: 4009 - DNA, 23 bp, Homo sapiens
  source 1..23: mol_type = other DNA
cactcaccactacatgttcacaa

SEQ ID NO: 4010 - DNA, 23 bp, Homo sapiens
  source 1..23: mol_type = other DNA
aactcaccactgcatgttctaac

SEQ ID NO: 4011 - DNA, 22 bp, Homo sapiens
  source 1..22: mol_type = other DNA
aactctccctgcctgcacaagg

SEQ ID NO: 4012 - DNA, 23 bp, Homo sapiens
  source 1..23: mol_type = other DNA
tactgagctccacatgctcacta

SEQ ID NO: 4013 - DNA, 24 bp, Homo sapiens
  source 1..24: mol_type = other DNA
ccctaacccctgcattgctcatgg

SEQ ID NO: 4014 - DNA, 22 bp, Homo sapiens
  source 1..22: mol_type = other DNA
tgcctcctatgaatgctcatgg

SEQ ID NO: 4015 - DNA, 22 bp, Homo sapiens
  source 1..22: mol_type = other DNA
tcttcacctctgatgctcactg

SEQ ID NO: 4016 - DNA, 22 bp, Homo sapiens
  source 1..22: mol_type = other DNA
tatgatctctgcatgttcatga

SEQ ID NO: 4017 - DNA, 23 bp, Homo sapiens
  source 1..23: mol_type = other DNA
tagcccccactgcatggtcatgc

SEQ ID NO: 4018 - DNA, 23 bp, Homo sapiens
  source 1..23: mol_type = other DNA
aactgacctctgcaggttcattc

SEQ ID NO: 4019 - DNA, 23 bp, Homo sapiens
  source 1..23: mol_type = other DNA
tagtcacttccacatactcactg

SEQ ID NO: 4020 - DNA, 22 bp, Homo sapiens
  source 1..22: mol_type = other DNA
gtctcacctcgactgctcatgg

SEQ ID NO: 4021 - DNA, 24 bp, Homo sapiens
  source 1..24: mol_type = other DNA
tcctcacccctgcaaagctcaggg

SEQ ID NO: 4022 - DNA, 21 bp, Homo sapiens
  source 1..21: mol_type = other DNA
tactctcctccatgctcttgg

SEQ ID NO: 4023 - DNA, 22 bp, Homo sapiens
  source 1..22: mol_type = other DNA
cacttaccccagcatgtcatgg

SEQ ID NO: 4024 - DNA, 23 bp, Homo sapiens
  source 1..23: mol_type = other DNA
tgctgtactctgcatgatcagtg

SEQ ID NO: 4025 - DNA, 23 bp, Homo sapiens
  source 1..23: mol_type = other DNA
aaatcagcaatgcatgctcactg

SEQ ID NO: 4026 - DNA, 23 bp, Homo sapiens
  source 1..23: mol_type = other DNA
aatccacatatgcatactcaggg

SEQ ID NO: 4027 - DNA, 23 bp, Homo sapiens
  source 1..23: mol_type = other DNA
tactcacccttgcaagcataagg

SEQ ID NO: 4028 - DNA, 22 bp, Homo sapiens
  source 1..22: mol_type = other DNA
tacccaccatgcatgcacagag

SEQ ID NO: 4029 - DNA, 22 bp, Homo sapiens
  source 1..22: mol_type = other DNA
tcatcacctctgatgcccctgg

SEQ ID NO: 4030 - DNA, 23 bp, Homo sapiens
  source 1..23: mol_type = other DNA
tgttcacatctttatgctcatgc

SEQ ID NO: 4031 - DNA, 23 bp, Homo sapiens
  source 1..23: mol_type = other DNA
tactcccctgcacctgctccagg

SEQ ID NO: 4032 - DNA, 25 bp, Homo sapiens
  source 1..25: mol_type = other DNA
tattcacctctgctaatggtaaaag

SEQ ID NO: 4033 - DNA, 22 bp, Homo sapiens
  source 1..22: mol_type = other DNA
ttcacacctgtgctgctctggg

SEQ ID NO: 4034 - DNA, 22 bp, Homo sapiens
  source 1..22: mol_type = other DNA
tactcatgcctgcagctcaagg

SEQ ID NO: 4035 - DNA, 23 bp, Homo sapiens
  source 1..23: mol_type = other DNA
tatgcacaccagcatgcacacgg

SEQ ID NO: 4036 - DNA, 23 bp, Homo sapiens
  source 1..23: mol_type = other DNA
cactcatccatgcatgctcaccc

SEQ ID NO: 4037 - DNA, 23 bp, Homo sapiens
  source 1..23: mol_type = other DNA
gactcagctctggatgcccggtg

SEQ ID NO: 4038 - DNA, 21 bp, Homo sapiens
  source 1..21: mol_type = other DNA
ttttcacctccatgcacaggg

SEQ ID NO: 4039 - DNA, 22 bp, Homo sapiens
  source 1..22: mol_type = other DNA
cactccctctggaagctctagg

SEQ ID NO: 4040 - DNA, 23 bp, Homo sapiens
  source 1..23: mol_type = other DNA
ccctcacctctgccttctcctga

SEQ ID NO: 4041 - DNA, 23 bp, Homo sapiens
  source 1..23: mol_type = other DNA
tactcacctgaacctgcccagtg

SEQ ID NO: 4042 - DNA, 24 bp, Homo sapiens
  source 1..24: mol_type = other DNA
atctcacctctgacatgctaaggc

SEQ ID NO: 4043 - DNA, 21 bp, Homo sapiens
  source 1..21: mol_type = other DNA
tactcacgtgcatgcccagag

SEQ ID NO: 4044 - DNA, 22 bp, Homo sapiens
  source 1..22: mol_type = other DNA
ttctcactctgcatgcttacat

SEQ ID NO: 4045 - DNA, 22 bp, Homo sapiens
  source 1..22: mol_type = other DNA
ttgtcacccctgcttgtcacgg

SEQ ID NO: 4046 - DNA, 23 bp, Homo sapiens
  source 1..23: mol_type = other DNA
tacccacctcagcatggcagggg

SEQ ID NO: 4047 - DNA, 23 bp, Homo sapiens
  source 1..23: mol_type = other DNA
tacccacctcagcctcctaaagt

SEQ ID NO: 4048 - DNA, 23 bp, Homo sapiens
  source 1..23: mol_type = other DNA
tactaacgtgtgcatgtccgggg

SEQ ID NO: 4049 - DNA, 23 bp, Homo sapiens
  source 1..23: mol_type = other DNA
tactcacctcttctcgctggttg

SEQ ID NO: 4050 - DNA, 23 bp, Homo sapiens
  source 1..23: mol_type = other DNA
tactcaaatctgcaagatcataa

SEQ ID NO: 4051 - DNA, 23 bp, Homo sapiens
  source 1..23: mol_type = other DNA
aacacacatgtgcatgcacatgc

SEQ ID NO: 4052 - DNA, 23 bp, Homo sapiens
  source 1..23: mol_type = other DNA
tacataccacagcatgctcagct

SEQ ID NO: 4053 - DNA, 23 bp, Homo sapiens
  source 1..23: mol_type = other DNA
tttacacccctccatactcatgg

SEQ ID NO: 4054 - DNA, 23 bp, Homo sapiens
  source 1..23: mol_type = other DNA
taaacacctctgtatgctatggt

SEQ ID NO: 4055 - DNA, 23 bp, Homo sapiens
  source 1..23: mol_type = other DNA
tactaacaacttcttgctcatgc

SEQ ID NO: 4056 - DNA, 25 bp, Homo sapiens
  source 1..25: mol_type = other DNA
tactcccctctggccttacccatgg

SEQ ID NO: 4057 - DNA, 22 bp, Homo sapiens
  source 1..22: mol_type = other DNA
aactcactctggattctctggg

SEQ ID NO: 4058 - DNA, 22 bp, Homo sapiens
  source 1..22: mol_type = other DNA
cactcaccctgcatcatcgggg

SEQ ID NO: 4059 - DNA, 22 bp, Homo sapiens
  source 1..22: mol_type = other DNA
tacccaccccgcttcctcaagg

SEQ ID NO: 4060 - DNA, 21 bp, Homo sapiens
  source 1..21: mol_type = other DNA
tactcctctgcatggccaaag

SEQ ID NO: 4061 - DNA, 22 bp, Homo sapiens
  source 1..22: mol_type = other DNA
tactaaccttaaatgctaatgg

SEQ ID NO: 4062 - DNA, 22 bp, Homo sapiens
  source 1..22: mol_type = other DNA
tttttacctgtgcatctcaggg

SEQ ID NO: 4063 - DNA, 22 bp, Homo sapiens
  source 1..22: mol_type = other DNA
ctcttacctctgcatgccacag

SEQ ID NO: 4064 - DNA, 21 bp, Homo sapiens
  source 1..21: mol_type = other DNA
ttctcacctctgcattcagtg

SEQ ID NO: 4065 - DNA, 23 bp, Homo sapiens
  source 1..23: mol_type = other DNA
taaactccgctgcctgcccatgg

SEQ ID NO: 4066 - DNA, 23 bp, Homo sapiens
  source 1..23: mol_type = other DNA
ttcttacctctgcatggttgagg

SEQ ID NO: 4067 - DNA, 23 bp, Homo sapiens
  source 1..23: mol_type = other DNA
tactgacctctctacgcacattg

SEQ ID NO: 4068 - DNA, 23 bp, Homo sapiens
  source 1..23: mol_type = other DNA
tattcaccttgggatgcccagtg

SEQ ID NO: 4069 - DNA, 22 bp, Homo sapiens
  source 1..22: mol_type = other DNA
tactcactgtccatactcactg

SEQ ID NO: 4070 - DNA, 23 bp, Homo sapiens
  source 1..23: mol_type = other DNA
tactcatctctgagtgcccttgg

SEQ ID NO: 4071 - DNA, 24 bp, Homo sapiens
  source 1..24: mol_type = other DNA
tacagcacctctgcattgccaggg

SEQ ID NO: 4072 - DNA, 23 bp, Homo sapiens
  source 1..23: mol_type = other DNA
tattcacctctgcatctccaggg

SEQ ID NO: 4073 - DNA, 23 bp, Homo sapiens
  source 1..23: mol_type = other DNA
tactcatccatacatgctcatgg

SEQ ID NO: 4074 - DNA, 23 bp, Homo sapiens
  source 1..23: mol_type = other DNA
tattcacctctgcttgctgaggg

SEQ ID NO: 4075 - DNA, 22 bp, Homo sapiens
  source 1..22: mol_type = other DNA
tatttacctctgcatctcagag

SEQ ID NO: 4076 - DNA, 23 bp, Homo sapiens
  source 1..23: mol_type = other DNA
cattcacctctgcatggataggg

SEQ ID NO: 4077 - DNA, 23 bp, Homo sapiens
  source 1..23: mol_type = other DNA
tattcactactgcatgcccaggg

SEQ ID NO: 4078 - DNA, 23 bp, Homo sapiens
  source 1..23: mol_type = other DNA
atccaacctatgcatgctcaggg

SEQ ID NO: 4079 - DNA, 22 bp, Homo sapiens
  source 1..22: mol_type = other DNA
caatacctctgtatgttcaggg

SEQ ID NO: 4080 - DNA, 22 bp, Homo sapiens
  source 1..22: mol_type = other DNA
aaatcaccctgcatgctcatgg

SEQ ID NO: 4081 - DNA, 21 bp, Homo sapiens
  source 1..21: mol_type = other DNA
taatcctatgcatgctcacag

SEQ ID NO: 4082 - DNA, 23 bp, Homo sapiens
  source 1..23: mol_type = other DNA
tgctctcctatgcatgctctggg

SEQ ID NO: 4083 - DNA, 23 bp, Homo sapiens
  source 1..23: mol_type = other DNA
tactcacctctgcattcacagaa

SEQ ID NO: 4084 - DNA, 23 bp, Homo sapiens
  source 1..23: mol_type = other DNA
ctcccacctctgcatgctcctcg

SEQ ID NO: 4085 - DNA, 23 bp, Homo sapiens
  source 1..23: mol_type = other DNA
gactcatacatgcatgctcatga

SEQ ID NO: 4086 - DNA, 23 bp, Homo sapiens
  source 1..23: mol_type = other DNA
tccagtactctacatgctcaggg

SEQ ID NO: 4087 - DNA, 23 bp, Homo sapiens
  source 1..23: mol_type = other DNA
ttgttaactctgtatgctcttgg

SEQ ID NO: 4088 - DNA, 23 bp, Homo sapiens
  source 1..23: mol_type = other DNA
tccacattattgcatgctcatgg

SEQ ID NO: 4089 - DNA, 23 bp, Homo sapiens
  source 1..23: mol_type = other DNA
ttctctactctacatgttcaggg

SEQ ID NO: 4090 - DNA, 22 bp, Homo sapiens
  source 1..22: mol_type = other DNA
tatactactctgctgctcaggg

SEQ ID NO: 4091 - DNA, 22 bp, Homo sapiens
  source 1..22: mol_type = other DNA
taaccacactgcatgctctggg

SEQ ID NO: 4092 - DNA, 22 bp, Homo sapiens
  source 1..22: mol_type = other DNA
tggtacctctgcatgtccatgg

SEQ ID NO: 4093 - DNA, 22 bp, Homo sapiens
  source 1..22: mol_type = other DNA
ttctacctcagcatgttcaagg

SEQ ID NO: 4094 - DNA, 22 bp, Homo sapiens
  source 1..22: mol_type = other DNA
ctctcaccctgcatggtcagag

SEQ ID NO: 4095 - DNA, 23 bp, Homo sapiens
  source 1..23: mol_type = other DNA
tacaatcctcagcatgttcatgg

SEQ ID NO: 4096 - DNA, 22 bp, Homo sapiens
  source 1..22: mol_type = other DNA
tcatcacctatgcatgtcaagg

SEQ ID NO: 4097 - DNA, 23 bp, Homo sapiens
  source 1..23: mol_type = other DNA
cccacacctctacaagctcaggg

SEQ ID NO: 4098 - DNA, 22 bp, Homo sapiens
  source 1..22: mol_type = other DNA
aacacacatcccatgctcatgg

SEQ ID NO: 4099 - DNA, 22 bp, Homo sapiens
  source 1..22: mol_type = other DNA
aactaatatctgatgctcaagg

SEQ ID NO: 4100 - DNA, 22 bp, Homo sapiens
  source 1..22: mol_type = other DNA
tactcatcctgcatactccctg

SEQ ID NO: 4101 - DNA, 24 bp, Homo sapiens
  source 1..24: mol_type = other DNA
aactcaccactggcatgcccgggg

SEQ ID NO: 4102 - DNA, 23 bp, Homo sapiens
  source 1..23: mol_type = other DNA
cacagcctactgcatgctcaagg

SEQ ID NO: 4103 - DNA, 23 bp, Homo sapiens
  source 1..23: mol_type = other DNA
acagcaactctgtatgctcaagg

SEQ ID NO: 4104 - DNA, 22 bp, Homo sapiens
  source 1..22: mol_type = other DNA
tactgcctcagcatgctccatg

SEQ ID NO: 4105 - DNA, 23 bp, Homo sapiens
  source 1..23: mol_type = other DNA
cagcccccactgcatgcacatgg

SEQ ID NO: 4106 - DNA, 23 bp, Homo sapiens
  source 1..23: mol_type = other DNA
cacataactctacatgcttaagg

SEQ ID NO: 4107 - DNA, 22 bp, Homo sapiens
  source 1..22: mol_type = other DNA
gtcccacctctgcatctcatgc

SEQ ID NO: 4108 - DNA, 21 bp, Homo sapiens
  source 1..21: mol_type = other DNA
tgctcacctctgtgctcatgg

SEQ ID NO: 4109 - DNA, 23 bp, Homo sapiens
  source 1..23: mol_type = other DNA
tactcacccctgcctcctcaagg

SEQ ID NO: 4110 - DNA, 22 bp, Homo sapiens
  source 1..22: mol_type = other DNA
cactcattctgcatgatccagg

SEQ ID NO: 4111 - DNA, 23 bp, Homo sapiens
  source 1..23: mol_type = other DNA
cactcacctctgcattctgggaa

SEQ ID NO: 4112 - DNA, 23 bp, Homo sapiens
  source 1..23: mol_type = other DNA
gtctcacctctgcctgctcagga

SEQ ID NO: 4113 - DNA, 22 bp, Homo sapiens
  source 1..22: mol_type = other DNA
ttctcaaactgcatgctcatgc

SEQ ID NO: 4114 - DNA, 23 bp, Homo sapiens
  source 1..23: mol_type = other DNA
cccacacccctacaagctcaggg

SEQ ID NO: 4115 - DNA, 22 bp, Homo sapiens
  source 1..22: mol_type = other DNA
taaaaccactgcatgttcaggg

SEQ ID NO: 4116 - DNA, 22 bp, Homo sapiens
  source 1..22: mol_type = other DNA
ctctcacctctgctactcagtg

SEQ ID NO: 4117 - DNA, 23 bp, Homo sapiens
  source 1..23: mol_type = other DNA
cacacacacacgcatgctcatgg

SEQ ID NO: 4118 - DNA, 24 bp, Homo sapiens
  source 1..24: mol_type = other DNA
tcctgtaactctgcatgcacaagg

SEQ ID NO: 4119 - DNA, 22 bp, Homo sapiens
  source 1..22: mol_type = other DNA
tactccctctgtaggctctagg

SEQ ID NO: 4120 - DNA, 22 bp, Homo sapiens
  source 1..22: mol_type = other DNA
tcctacctttacatactcaagg

SEQ ID NO: 4121 - DNA, 22 bp, Homo sapiens
  source 1..22: mol_type = other DNA
gtctcacccctgctgcccacgg

SEQ ID NO: 4122 - DNA, 22 bp, Homo sapiens
  source 1..22: mol_type = other DNA
tagtcatatctacatctcaggg

SEQ ID NO: 4123 - DNA, 23 bp, Homo sapiens
  source 1..23: mol_type = other DNA
ggatcacctctgcatcttcaagg

SEQ ID NO: 4124 - DNA, 22 bp, Homo sapiens
  source 1..22: mol_type = other DNA
tcctcaccttgcatactctttg

SEQ ID NO: 4125 - DNA, 23 bp, Homo sapiens
  source 1..23: mol_type = other DNA
tcagcacctctgcttggtcaagg

SEQ ID NO: 4126 - DNA, 24 bp, Homo sapiens
  source 1..24: mol_type = other DNA
tattgcacctctgcatgcctcagg

SEQ ID NO: 4127 - DNA, 21 bp, Homo sapiens
  source 1..21: mol_type = other DNA
tacatacctccatgctcatag

SEQ ID NO: 4128 - DNA, 23 bp, Homo sapiens
  source 1..23: mol_type = other DNA
tgctctgcactgcatgctctggg

SEQ ID NO: 4129 - DNA, 23 bp, Homo sapiens
  source 1..23: mol_type = other DNA
aaatcatctccacatgctcatag

SEQ ID NO: 4130 - DNA, 23 bp, Homo sapiens
  source 1..23: mol_type = other DNA
atttcacttctgcatgctctatg

SEQ ID NO: 4131 - DNA, 23 bp, Homo sapiens
  source 1..23: mol_type = other DNA
aacaaaacactgcatgctcatga

SEQ ID NO: 4132 - DNA, 23 bp, Homo sapiens
  source 1..23: mol_type = other DNA
catacaccacagcatgctcaccg

SEQ ID NO: 4133 - DNA, 23 bp, Homo sapiens
  source 1..23: mol_type = other DNA
aacttccacctccatgctcaagg

SEQ ID NO: 4134 - DNA, 24 bp, Homo sapiens
  source 1..24: mol_type = other DNA
aacacaacatctgcatactcaggg

SEQ ID NO: 4135 - DNA, 23 bp, Homo sapiens
  source 1..23: mol_type = other DNA
agtgcccctctgcctgctcaggg

SEQ ID NO: 4136 - DNA, 23 bp, Homo sapiens
  source 1..23: mol_type = other DNA
gtctaacctctgcatgctccaca

SEQ ID NO: 4137 - DNA, 23 bp, Homo sapiens
  source 1..23: mol_type = other DNA
gcctcacttctggatgctcatgg

SEQ ID NO: 4138 - DNA, 23 bp, Homo sapiens
  source 1..23: mol_type = other DNA
ccctcacccctgcatgtataagg

SEQ ID NO: 4139 - DNA, 23 bp, Homo sapiens
  source 1..23: mol_type = other DNA
aagagacctctgcatgcacagtg

SEQ ID NO: 4140 - DNA, 23 bp, Homo sapiens
  source 1..23: mol_type = other DNA
tacctccctaagcatgcacatgg

SEQ ID NO: 4141 - DNA, 23 bp, Homo sapiens
  source 1..23: mol_type = other DNA
tctacacttcagcatgctccagg

SEQ ID NO: 4142 - DNA, 23 bp, Homo sapiens
  source 1..23: mol_type = other DNA
aactccctgctgtatgctcatga

SEQ ID NO: 4143 - DNA, 22 bp, Homo sapiens
  source 1..22: mol_type = other DNA
gactacctctacatgttcagtg

SEQ ID NO: 4144 - DNA, 22 bp, Homo sapiens
  source 1..22: mol_type = other DNA
tcttcacatcccatgctcatgg

SEQ ID NO: 4145 - DNA, 23 bp, Homo sapiens
  source 1..23: mol_type = other DNA
gccaaacatctgcatgctcatgc

SEQ ID NO: 4146 - DNA, 23 bp, Homo sapiens
  source 1..23: mol_type = other DNA
cacacacggatgcatgcacatgg

SEQ ID NO: 4147 - DNA, 23 bp, Homo sapiens
  source 1..23: mol_type = other DNA
cacccacctctgcatgcccagtc

SEQ ID NO: 4148 - DNA, 23 bp, Homo sapiens
  source 1..23: mol_type = other DNA
taaagatcagtgcatgctcacgg

SEQ ID NO: 4149 - DNA, 23 bp, Homo sapiens
  source 1..23: mol_type = other DNA
tacttacctctccatgctctagc

SEQ ID NO: 4150 - DNA, 24 bp, Homo sapiens
  source 1..24: mol_type = other DNA
tagtcaaccactgcatagtcacgg

SEQ ID NO: 4151 - DNA, 23 bp, Homo sapiens
  source 1..23: mol_type = other DNA
aacataccactgcatgctcacac

SEQ ID NO: 4152 - DNA, 22 bp, Homo sapiens
  source 1..22: mol_type = other DNA
tgctcactctgaatactcaagg

SEQ ID NO: 4153 - DNA, 22 bp, Homo sapiens
  source 1..22: mol_type = other DNA
aaaacacatctcatgctcatgg

SEQ ID NO: 4154 - DNA, 23 bp, Homo sapiens
  source 1..23: mol_type = other DNA
ttctccccactgtatgcagaagg

SEQ ID NO: 4155 - DNA, 23 bp, Homo sapiens
  source 1..23: mol_type = other DNA
tactcactactgaaagctcaggg

SEQ ID NO: 4156 - DNA, 22 bp, Homo sapiens
  source 1..22: mol_type = other DNA
aacacgcctcgcatgctcatgt

SEQ ID NO: 4157 - DNA, 21 bp, Homo sapiens
  source 1..21: mol_type = other DNA
cattcacctccaagctcacgg

SEQ ID NO: 4158 - DNA, 21 bp, Homo sapiens
  source 1..21: mol_type = other DNA
cactcaccaccatgctcaggt

SEQ ID NO: 4159 - DNA, 23 bp, Homo sapiens
  source 1..23: mol_type = other DNA
ctctcaccactgcatgcacttgc

SEQ ID NO: 4160 - DNA, 22 bp, Homo sapiens
  source 1..22: mol_type = other DNA
gactctcctctcaggctcatgg

SEQ ID NO: 4161 - DNA, 22 bp, Homo sapiens
  source 1..22: mol_type = other DNA
caagcacctctgcctctcaggg

SEQ ID NO: 4162 - DNA, 22 bp, Homo sapiens
  source 1..22: mol_type = other DNA
tactcacctgtgcagatatggg

SEQ ID NO: 4163 - DNA, 23 bp, Homo sapiens
  source 1..23: mol_type = other DNA
tcatcacctctccatgctagggc

SEQ ID NO: 4164 - DNA, 24 bp, Homo sapiens
  source 1..24: mol_type = other DNA
tgctgacactctacatgctgacgg

SEQ ID NO: 4165 - DNA, 22 bp, Homo sapiens
  source 1..22: mol_type = other DNA
ttctaattctgcaagctcaggg

SEQ ID NO: 4166 - DNA, 23 bp, Homo sapiens
  source 1..23: mol_type = other DNA
atctcaccactgcatactccagc

SEQ ID NO: 4167 - DNA, 23 bp, Homo sapiens
  source 1..23: mol_type = other DNA
cacctacatctacaggctcaagg

SEQ ID NO: 4168 - DNA, 23 bp, Homo sapiens
  source 1..23: mol_type = other DNA
cattaccctctgcttgcccaggg

SEQ ID NO: 4169 - DNA, 23 bp, Homo sapiens
  source 1..23: mol_type = other DNA
tacatgcatgtgcatgctcagtg

SEQ ID NO: 4170 - DNA, 22 bp, Homo sapiens
  source 1..22: mol_type = other DNA
tactcccctttgcatctcaaga

SEQ ID NO: 4171 - DNA, 23 bp, Homo sapiens
  source 1..23: mol_type = other DNA
tactcccctctgcctgccctctg

SEQ ID NO: 4172 - DNA, 23 bp, Homo sapiens
  source 1..23: mol_type = other DNA
tacacacctttatatgctcatgg

SEQ ID NO: 4173 - DNA, 21 bp, Homo sapiens
  source 1..21: mol_type = other DNA
tcctcacccccatgcacaagg

SEQ ID NO: 4174 - DNA, 22 bp, Homo sapiens
  source 1..22: mol_type = other DNA
ttcccaccagtgatgctcaagg

SEQ ID NO: 4175 - DNA, 23 bp, Homo sapiens
  source 1..23: mol_type = other DNA
gacccacctctgcaaggtgaaga

SEQ ID NO: 4176 - DNA, 23 bp, Homo sapiens
  source 1..23: mol_type = other DNA
ttctcacgaaagcattctcatgg

SEQ ID NO: 4177 - DNA, 23 bp, Homo sapiens
  source 1..23: mol_type = other DNA
gattcacctttgcatgttctttg

SEQ ID NO: 4178 - DNA, 23 bp, Homo sapiens
  source 1..23: mol_type = other DNA
tactcccccctgcagggtgaagg

SEQ ID NO: 4179 - DNA, 24 bp, Homo sapiens
  source 1..24: mol_type = other DNA
tactcacttgctgcctggtctagg

SEQ ID NO: 4180 - DNA, 22 bp, Homo sapiens
  source 1..22: mol_type = other DNA
tagactcctctgctgctcacag

SEQ ID NO: 4181 - DNA, 22 bp, Homo sapiens
  source 1..22: mol_type = other DNA
tactccctctgcactctcctgg

SEQ ID NO: 4182 - DNA, 22 bp, Homo sapiens
  source 1..22: mol_type = other DNA
cactcactctgcatcctctgag

SEQ ID NO: 4183 - DNA, 22 bp, Homo sapiens
  source 1..22: mol_type = other DNA
atctcacccctgcattccaggg

SEQ ID NO: 4184 - DNA, 23 bp, Homo sapiens
  source 1..23: mol_type = other DNA
ttcccacatctgcatactcactt

SEQ ID NO: 4185 - DNA, 23 bp, Homo sapiens
  source 1..23: mol_type = other DNA
ctctgacctatgcatgcttcagg

SEQ ID NO: 4186 - DNA, 23 bp, Homo sapiens
  source 1..23: mol_type = other DNA
tacaaaactgttcatgctcagtg

SEQ ID NO: 4187 - DNA, 23 bp, Homo sapiens
  source 1..23: mol_type = other DNA
tacctacctctggatgcccacag

SEQ ID NO: 4188 - DNA, 23 bp, Homo sapiens
  source 1..23: mol_type = other DNA
tactcccatcagcaagatcatgt

SEQ ID NO: 4189 - DNA, 22 bp, Homo sapiens
  source 1..22: mol_type = other DNA
tagtcaacttgcaggctaatgg

SEQ ID NO: 4190 - DNA, 21 bp, Homo sapiens
  source 1..21: mol_type = other DNA
tactcaactatatgctcaagt

SEQ ID NO: 4191 - DNA, 23 bp, Homo sapiens
  source 1..23: mol_type = other DNA
ctcacaactctgcattctcttgg

SEQ ID NO: 4192 - DNA, 22 bp, Homo sapiens
  source 1..22: mol_type = other DNA
tactccctctgctttctcctga

SEQ ID NO: 4193 - DNA, 22 bp, Homo sapiens
  source 1..22: mol_type = other DNA
ccctcaccctgcatgctgatga

SEQ ID NO: 4194 - DNA, 21 bp, Homo sapiens
  source 1..21: mol_type = other DNA
tactcacctctgctcttactg

SEQ ID NO: 4195 - DNA, 23 bp, Homo sapiens
  source 1..23: mol_type = other DNA
tactcaccactgactcctcacca

SEQ ID NO: 4196 - DNA, 23 bp, Homo sapiens
  source 1..23: mol_type = other DNA
tactcaagcctacatgctcataa

SEQ ID NO: 4197 - DNA, 23 bp, Homo sapiens
  source 1..23: mol_type = other DNA
tactcatttctgcatgcttcatg

SEQ ID NO: 4198 - DNA, 22 bp, Homo sapiens
  source 1..22: mol_type = other DNA
tactctttctgtattctcaggg

SEQ ID NO: 4199 - DNA, 22 bp, Homo sapiens
  source 1..22: mol_type = other DNA
tattcacctcttcatctcagac

SEQ ID NO: 4200 - DNA, 22 bp, Homo sapiens
  source 1..22: mol_type = other DNA
tactcacattccatgctcatgg

SEQ ID NO: 4201 - DNA, 22 bp, Homo sapiens
  source 1..22: mol_type = other DNA
agctcacctcgcatgttcaagg

SEQ ID NO: 4202 - DNA, 23 bp, Homo sapiens
  source 1..23: mol_type = other DNA
tactcacctctgtatctccaagg

SEQ ID NO: 4203 - DNA, 23 bp, Homo sapiens
  source 1..23: mol_type = other DNA
tacgcaccactgcatgcccagtg

SEQ ID NO: 4204 - DNA, 22 bp, Homo sapiens
  source 1..22: mol_type = other DNA
tactcactctgcctgttcatgg

SEQ ID NO: 4205 - DNA, 23 bp, Homo sapiens
  source 1..23: mol_type = other DNA
tacacacctctgcaagctctctg

SEQ ID NO: 4206 - DNA, 23 bp, Homo sapiens
  source 1..23: mol_type = other DNA
ttatcaccactacatgctcttag

SEQ ID NO: 4207 - DNA, 23 bp, Homo sapiens
  source 1..23: mol_type = other DNA
aactcaccgctgcatgccccagg

SEQ ID NO: 4208 - DNA, 22 bp, Homo sapiens
  source 1..22: mol_type = other DNA
ctctcacctctgcagctcaggg

SEQ ID NO: 4209 - DNA, 23 bp, Homo sapiens
  source 1..23: mol_type = other DNA
tacccacctctgcttacccatgg

SEQ ID NO: 4210 - DNA, 22 bp, Homo sapiens
  source 1..22: mol_type = other DNA
aactcactcagcatgttctagg

SEQ ID NO: 4211 - DNA, 21 bp, Homo sapiens
  source 1..21: mol_type = other DNA
tactcacatacatgttcatgg

SEQ ID NO: 4212 - DNA, 23 bp, Homo sapiens
  source 1..23: mol_type = other DNA
ctctctctactgcatgctcctgg

SEQ ID NO: 4213 - DNA, 22 bp, Homo sapiens
  source 1..22: mol_type = other DNA
cacacacctctgcagctcaggg

SEQ ID NO: 4214 - DNA, 23 bp, Homo sapiens
  source 1..23: mol_type = other DNA
aatacacctctgcatgtcctggg

SEQ ID NO: 4215 - DNA, 23 bp, Homo sapiens
  source 1..23: mol_type = other DNA
cactcacctctgcatctctagtg

SEQ ID NO: 4216 - DNA, 22 bp, Homo sapiens
  source 1..22: mol_type = other DNA
taataaatctgcatgctcttgg

SEQ ID NO: 4217 - DNA, 23 bp, Homo sapiens
  source 1..23: mol_type = other DNA
cattatcaactgcatgctcacgg

SEQ ID NO: 4218 - DNA, 23 bp, Homo sapiens
  source 1..23: mol_type = other DNA
tcttcaccaccacatgctcaggg

SEQ ID NO: 4219 - DNA, 21 bp, Homo sapiens
  source 1..21: mol_type = other DNA
tactcatctgcaagctcagga

SEQ ID NO: 4220 - DNA, 23 bp, Homo sapiens
  source 1..23: mol_type = other DNA
atatcacctttacatgctcctgg

SEQ ID NO: 4221 - DNA, 23 bp, Homo sapiens
  source 1..23: mol_type = other DNA
attttacctctgcaggctcagag

SEQ ID NO: 4222 - DNA, 23 bp, Homo sapiens
  source 1..23: mol_type = other DNA
tacccaaccttgcatactcaagg

SEQ ID NO: 4223 - DNA, 24 bp, Homo sapiens
  source 1..24: mol_type = other DNA
cacacacccctagcatgcacaagg

SEQ ID NO: 4224 - DNA, 22 bp, Homo sapiens
  source 1..22: mol_type = other DNA
tacccaccctacatgccctcgg

SEQ ID NO: 4225 - DNA, 23 bp, Homo sapiens
  source 1..23: mol_type = other DNA
tgctcatctctgcatattcatgg

SEQ ID NO: 4226 - DNA, 23 bp, Homo sapiens
  source 1..23: mol_type = other DNA
taattacctctgcatgctttcag

SEQ ID NO: 4227 - DNA, 23 bp, Homo sapiens
  source 1..23: mol_type = other DNA
gactccacattgcatgctcaggg

SEQ ID NO: 4228 - DNA, 23 bp, Homo sapiens
  source 1..23: mol_type = other DNA
tattcacctctgcattcacagtg

SEQ ID NO: 4229 - DNA, 22 bp, Homo sapiens
  source 1..22: mol_type = other DNA
taatcccactgcatgctcaaga

SEQ ID NO: 4230 - DNA, 23 bp, Homo sapiens
  source 1..23: mol_type = other DNA
tcctctactatacatgctcaagg

SEQ ID NO: 4231 - DNA, 22 bp, Homo sapiens
  source 1..22: mol_type = other DNA
gattcacctctgatgctcagag

SEQ ID NO: 4232 - DNA, 22 bp, Homo sapiens
  source 1..22: mol_type = other DNA
tactcattgtacatgcttaagg

SEQ ID NO: 4233 - DNA, 22 bp, Homo sapiens
  source 1..22: mol_type = other DNA
tagtaacctctgcatttcacgg

SEQ ID NO: 4234 - DNA, 22 bp, Homo sapiens
  source 1..22: mol_type = other DNA
aactcactctgcatgcaactgg

SEQ ID NO: 4235 - DNA, 23 bp, Homo sapiens
  source 1..23: mol_type = other DNA
attttaccactgcaagctcatgg

SEQ ID NO: 4236 - DNA, 23 bp, Homo sapiens
  source 1..23: mol_type = other DNA
gacaaggctatgcatgctcaagg

SEQ ID NO: 4237 - DNA, 22 bp, Homo sapiens
  source 1..22: mol_type = other DNA
cagttacccttcatgctcatgg

SEQ ID NO: 4238 - DNA, 23 bp, Homo sapiens
  source 1..23: mol_type = other DNA
tcctcacctcttcatgtccagga

SEQ ID NO: 4239 - DNA, 22 bp, Homo sapiens
  source 1..22: mol_type = other DNA
ttttaacctctgcatcccaagg

SEQ ID NO: 4240 - DNA, 22 bp, Homo sapiens
  source 1..22: mol_type = other DNA
tatcacctctgcatgtcaaaag

SEQ ID NO: 4241 - DNA, 22 bp, Homo sapiens
  source 1..22: mol_type = other DNA
tactcactctccatgctcacat

SEQ ID NO: 4242 - DNA, 22 bp, Homo sapiens
  source 1..22: mol_type = other DNA
tcgtaacttctgatgctcatgg

SEQ ID NO: 4243 - DNA, 23 bp, Homo sapiens
  source 1..23: mol_type = other DNA
cattcaccactgcaagctcctgg

SEQ ID NO: 4244 - DNA, 23 bp, Homo sapiens
  source 1..23: mol_type = other DNA
aatatgcctgtgcatgctcaagg

SEQ ID NO: 4245 - DNA, 22 bp, Homo sapiens
  source 1..22: mol_type = other DNA
gaaacacctcccatgctcatgg

SEQ ID NO: 4246 - DNA, 21 bp, Homo sapiens
  source 1..21: mol_type = other DNA
aattcatctgcatgctcatgc

SEQ ID NO: 4247 - DNA, 23 bp, Homo sapiens
  source 1..23: mol_type = other DNA
aacagcactttgcatgctcaggg

SEQ ID NO: 4248 - DNA, 23 bp, Homo sapiens
  source 1..23: mol_type = other DNA
tccctaaccctgcatgcccaggg

SEQ ID NO: 4249 - DNA, 22 bp, Homo sapiens
  source 1..22: mol_type = other DNA
cagtcacctctcctgctcatgg

SEQ ID NO: 4250 - DNA, 23 bp, Homo sapiens
  source 1..23: mol_type = other DNA
tacacacacatgcatgctcacgc

SEQ ID NO: 4251 - DNA, 23 bp, Homo sapiens
  source 1..23: mol_type = other DNA
tacataccacagcatgcacatgg

SEQ ID NO: 4252 - DNA, 21 bp, Homo sapiens
  source 1..21: mol_type = other DNA
gatttacctgcatgctcaagg

SEQ ID NO: 4253 - DNA, 23 bp, Homo sapiens
  source 1..23: mol_type = other DNA
tgcaaacatatccatgctcatgg

SEQ ID NO: 4254 - DNA, 23 bp, Homo sapiens
  source 1..23: mol_type = other DNA
gagtcaactatgcatgctcccgg

SEQ ID NO: 4255 - DNA, 23 bp, Homo sapiens
  source 1..23: mol_type = other DNA
tattcacctctgtattaacaggg

SEQ ID NO: 4256 - DNA, 23 bp, Homo sapiens
  source 1..23: mol_type = other DNA
tccccacctgtgtatgccctggg

SEQ ID NO: 4257 - DNA, 24 bp, Homo sapiens
  source 1..24: mol_type = other DNA
cacacacccctgcatgtctcgggg

SEQ ID NO: 4258 - DNA, 22 bp, Homo sapiens
  source 1..22: mol_type = other DNA
tactcacctctgtgcttcaagg

SEQ ID NO: 4259 - DNA, 23 bp, Homo sapiens
  source 1..23: mol_type = other DNA
gggccacctctgcaggctcaagg

SEQ ID NO: 4260 - DNA, 23 bp, Homo sapiens
  source 1..23: mol_type = other DNA
tcaccaccactgcctgctcaggg

SEQ ID NO: 4261 - DNA, 22 bp, Homo sapiens
  source 1..22: mol_type = other DNA
cactggccactgcatctcatgg

SEQ ID NO: 4262 - DNA, 23 bp, Homo sapiens
  source 1..23: mol_type = other DNA
gcctaatctcaacatgctcaagg

SEQ ID NO: 4263 - DNA, 23 bp, Homo sapiens
  source 1..23: mol_type = other DNA
aattacccactgcatgttcatgg

SEQ ID NO: 4264 - DNA, 22 bp, Homo sapiens
  source 1..22: mol_type = other DNA
atcacaactctgcatctcatgg

SEQ ID NO: 4265 - DNA, 23 bp, Homo sapiens
  source 1..23: mol_type = other DNA
tgctcacctgcacatgctccaga

SEQ ID NO: 4266 - DNA, 23 bp, Homo sapiens
  source 1..23: mol_type = other DNA
ctcctacctctaaatgctcaggg

SEQ ID NO: 4267 - DNA, 22 bp, Homo sapiens
  source 1..22: mol_type = other DNA
gaaacatctctcatgctcatgg

SEQ ID NO: 4268 - DNA, 23 bp, Homo sapiens
  source 1..23: mol_type = other DNA
tgctcatctccacatgctcacag

SEQ ID NO: 4269 - DNA, 23 bp, Homo sapiens
  source 1..23: mol_type = other DNA
tcttcatgtctgcatgctcaggg

SEQ ID NO: 4270 - DNA, 23 bp, Homo sapiens
  source 1..23: mol_type = other DNA
acctcacttccgcatgctcaaag

SEQ ID NO: 4271 - DNA, 23 bp, Homo sapiens
  source 1..23: mol_type = other DNA
tgttcacacatgcatgctcacag

SEQ ID NO: 4272 - DNA, 22 bp, Homo sapiens
  source 1..22: mol_type = other DNA
caagcacctcagcagctcatgg

SEQ ID NO: 4273 - DNA, 23 bp, Homo sapiens
  source 1..23: mol_type = other DNA
tactcatctctgcatgtttatag

SEQ ID NO: 4274 - DNA, 22 bp, Homo sapiens
  source 1..22: mol_type = other DNA
ctctcaacactgcatctcaagg

SEQ ID NO: 4275 - DNA, 23 bp, Homo sapiens
  source 1..23: mol_type = other DNA
tcctcacccctgcatgctccagc

SEQ ID NO: 4276 - DNA, 22 bp, Homo sapiens
  source 1..22: mol_type = other DNA
tactgacactgcatgctccaag

SEQ ID NO: 4277 - DNA, 22 bp, Homo sapiens
  source 1..22: mol_type = other DNA
gaatcacatcccatgctcatgg

SEQ ID NO: 4278 - DNA, 23 bp, Homo sapiens
  source 1..23: mol_type = other DNA
tcgtcacctctacatctccaggg

SEQ ID NO: 4279 - DNA, 24 bp, Homo sapiens
  source 1..24: mol_type = other DNA
tactaacattttgcatgctcacag

SEQ ID NO: 4280 - DNA, 22 bp, Homo sapiens
  source 1..22: mol_type = other DNA
tacccacctctctagctctagg

SEQ ID NO: 4281 - DNA, 22 bp, Homo sapiens
  source 1..22: mol_type = other DNA
tactcccgctgaaggctctagg

SEQ ID NO: 4282 - DNA, 23 bp, Homo sapiens
  source 1..23: mol_type = other DNA
aattcacttctgcatgcttgggg

SEQ ID NO: 4283 - DNA, 22 bp, Homo sapiens
  source 1..22: mol_type = other DNA
tactcacacagcttgctcaaga

SEQ ID NO: 4284 - DNA, 23 bp, Homo sapiens
  source 1..23: mol_type = other DNA
taaaaacctctgcatgcccgagg

SEQ ID NO: 4285 - DNA, 22 bp, Homo sapiens
  source 1..22: mol_type = other DNA
cactcacaatgcatgctcaagt

SEQ ID NO: 4286 - DNA, 23 bp, Homo sapiens
  source 1..23: mol_type = other DNA
cactaccttctgcatgctttggg

SEQ ID NO: 4287 - DNA, 23 bp, Homo sapiens
  source 1..23: mol_type = other DNA
tattctcctctgtatgtccatgt

SEQ ID NO: 4288 - DNA, 24 bp, Homo sapiens
  source 1..24: mol_type = other DNA
gactcaaactctgcataatcatgg

SEQ ID NO: 4289 - DNA, 22 bp, Homo sapiens
  source 1..22: mol_type = other DNA
taaaaacctcccatgctcatgg

SEQ ID NO: 4290 - DNA, 23 bp, Homo sapiens
  source 1..23: mol_type = other DNA
atcacacagctgcatgctcagtg

SEQ ID NO: 4291 - DNA, 23 bp, Homo sapiens
  source 1..23: mol_type = other DNA
aactcacctttgtatactcacag

SEQ ID NO: 4292 - DNA, 23 bp, Homo sapiens
  source 1..23: mol_type = other DNA
tgcttacctctgcagccccatgg

SEQ ID NO: 4293 - DNA, 24 bp, Homo sapiens
  source 1..24: mol_type = other DNA
agctcacctctgccatcctcatgg

SEQ ID NO: 4294 - DNA, 22 bp, Homo sapiens
  source 1..22: mol_type = other DNA
tgctcaccactgctgctcctgg

SEQ ID NO: 4295 - DNA, 22 bp, Homo sapiens
  source 1..22: mol_type = other DNA
atcccacctcagctgctcaagg

SEQ ID NO: 4296 - DNA, 23 bp, Homo sapiens
  source 1..23: mol_type = other DNA
tcctatactctgcatacttaagg

SEQ ID NO: 4297 - DNA, 23 bp, Homo sapiens
  source 1..23: mol_type = other DNA
tattcactactgcatgccaagtg

SEQ ID NO: 4298 - DNA, 23 bp, Homo sapiens
  source 1..23: mol_type = other DNA
tattcatctctgcatgcttcatg

SEQ ID NO: 4299 - DNA, 23 bp, Homo sapiens
  source 1..23: mol_type = other DNA
taagcacagctgaatgcttatgg

SEQ ID NO: 4300 - DNA, 23 bp, Homo sapiens
  source 1..23: mol_type = other DNA
tacacatatctacatgcccatgg

SEQ ID NO: 4301 - DNA, 23 bp, Homo sapiens
  source 1..23: mol_type = other DNA
taatactatcagcatgctcaggg

SEQ ID NO: 4302 - DNA, 22 bp, Homo sapiens
  source 1..22: mol_type = other DNA
aacacacctctgaagctcagag

SEQ ID NO: 4303 - DNA, 23 bp, Homo sapiens
  source 1..23: mol_type = other DNA
ttatcacctctgaatgtccatgg

SEQ ID NO: 4304 - DNA, 22 bp, Homo sapiens
  source 1..22: mol_type = other DNA
gactaactcagcatgttcaggg

SEQ ID NO: 4305 - DNA, 22 bp, Homo sapiens
  source 1..22: mol_type = other DNA
tgctcacctctcaagttcaagg

SEQ ID NO: 4306 - DNA, 22 bp, Homo sapiens
  source 1..22: mol_type = other DNA
aactcaccactcatgctaagga

SEQ ID NO: 4307 - DNA, 22 bp, Homo sapiens
  source 1..22: mol_type = other DNA
tactatatctgcatacacaggg

SEQ ID NO: 4308 - DNA, 22 bp, Homo sapiens
  source 1..22: mol_type = other DNA
cactcattactgatgctcatgg

SEQ ID NO: 4309 - DNA, 23 bp, Homo sapiens
  source 1..23: mol_type = other DNA
tagtcacctctgccttcgtactg

SEQ ID NO: 4310 - DNA, 23 bp, Homo sapiens
  source 1..23: mol_type = other DNA
tattcaatgttgtatgctcatgg

SEQ ID NO: 4311 - DNA, 24 bp, Homo sapiens
  source 1..24: mol_type = other DNA
tactcaccaaatgcatgcccacgt

SEQ ID NO: 4312 - DNA, 22 bp, Homo sapiens
  source 1..22: mol_type = other DNA
tactacctatgtttgctcaatg

SEQ ID NO: 4313 - DNA, 22 bp, Homo sapiens
  source 1..22: mol_type = other DNA
cacccacctctgcctctcaaag

SEQ ID NO: 4314 - DNA, 23 bp, Homo sapiens
  source 1..23: mol_type = other DNA
tacacattattccatgctcatgg

SEQ ID NO: 4315 - DNA, 22 bp, Homo sapiens
  source 1..22: mol_type = other DNA
tacccacctcggcctctcaaag

SEQ ID NO: 4316 - DNA, 23 bp, Homo sapiens
  source 1..23: mol_type = other DNA
tactcatctctgcaatgccagga

SEQ ID NO: 4317 - DNA, 23 bp, Homo sapiens
  source 1..23: mol_type = other DNA
tattcactgctgtatcctcaggc

SEQ ID NO: 4318 - DNA, 23 bp, Homo sapiens
  source 1..23: mol_type = other DNA
cactcaagtctgcattctcaata

SEQ ID NO: 4319 - DNA, 23 bp, Homo sapiens
  source 1..23: mol_type = other DNA
tactcaactctgcatttgtagtg

SEQ ID NO: 4320 - DNA, 25 bp, Homo sapiens
  source 1..25: mol_type = other DNA
acctcacctctgcatggcttcagtg

SEQ ID NO: 4321 - DNA, 22 bp, Homo sapiens
  source 1..22: mol_type = other DNA
tactgacttctgcagtctaggg

SEQ ID NO: 4322 - DNA, 23 bp, Homo sapiens
  source 1..23: mol_type = other DNA
tactcacatctgtgttctcaagc

SEQ ID NO: 4323 - DNA, 23 bp, Homo sapiens
  source 1..23: mol_type = other DNA
tatttagctctgcctggtcatgc

SEQ ID NO: 4324 - DNA, 24 bp, Homo sapiens
  source 1..24: mol_type = other DNA
ttctatcactctgcatcctcaagg

SEQ ID NO: 4325 - DNA, 25 bp, Homo sapiens
  source 1..25: mol_type = other DNA
tactcagaactgcagatgctcaagt

SEQ ID NO: 4326 - DNA, 22 bp, Homo sapiens
  source 1..22: mol_type = other DNA
ctctcacctctgcatgacaagc

SEQ ID NO: 4327 - DNA, 22 bp, Homo sapiens
  source 1..22: mol_type = other DNA
tactcacaatgcatgctaaagg

SEQ ID NO: 4328 - DNA, 23 bp, Homo sapiens
  source 1..23: mol_type = other DNA
cagtatcctctccatgctcagag

SEQ ID NO: 4329 - DNA, 23 bp, Homo sapiens
  source 1..23: mol_type = other DNA
tttatacctaagcatgctcaggg

SEQ ID NO: 4330 - DNA, 24 bp, Homo sapiens
  source 1..24: mol_type = other DNA
cacacacactctgcatgctctcga

SEQ ID NO: 4331 - DNA, 23 bp, Homo sapiens
  source 1..23: mol_type = other DNA
tactctactttgcatgctgacgg

SEQ ID NO: 4332 - DNA, 22 bp, Homo sapiens
  source 1..22: mol_type = other DNA
aactcacctacaatgctcatgg

SEQ ID NO: 4333 - DNA, 23 bp, Homo sapiens
  source 1..23: mol_type = other DNA
tgcccacccctgcatgcacacgg

SEQ ID NO: 4334 - DNA, 23 bp, Homo sapiens
  source 1..23: mol_type = other DNA
tactcacctctgcattctccagc

SEQ ID NO: 4335 - DNA, 22 bp, Homo sapiens
  source 1..22: mol_type = other DNA
acctcacccagcatgctcctgg

SEQ ID NO: 4336 - DNA, 23 bp, Homo sapiens
  source 1..23: mol_type = other DNA
aactctaatctgcatgctcaaga

SEQ ID NO: 4337 - DNA, 22 bp, Homo sapiens
  source 1..22: mol_type = other DNA
acatcacctctgatgatcatgg

SEQ ID NO: 4338 - DNA, 23 bp, Homo sapiens
  source 1..23: mol_type = other DNA
tacacacatccacatgctcaggg

SEQ ID NO: 4339 - DNA, 22 bp, Homo sapiens
  source 1..22: mol_type = other DNA
tactgacccagcatgctccagg

SEQ ID NO: 4340 - DNA, 23 bp, Homo sapiens
  source 1..23: mol_type = other DNA
agctcacctctgcatgtgcagag

SEQ ID NO: 4341 - DNA, 22 bp, Homo sapiens
  source 1..22: mol_type = other DNA
gactcaccgctgctgctcaggg

SEQ ID NO: 4342 - DNA, 22 bp, Homo sapiens
  source 1..22: mol_type = other DNA
ttctaactctacatgcccaggg

SEQ ID NO: 4343 - DNA, 23 bp, Homo sapiens
  source 1..23: mol_type = other DNA
tactcattcctgcattctcatgg

SEQ ID NO: 4344 - DNA, 23 bp, Homo sapiens
  source 1..23: mol_type = other DNA
gactcttcactgcatgctcttgg

SEQ ID NO: 4345 - DNA, 23 bp, Homo sapiens
  source 1..23: mol_type = other DNA
acataacctctgcatgcccaaag

SEQ ID NO: 4346 - DNA, 23 bp, Homo sapiens
  source 1..23: mol_type = other DNA
gtctgtcctatgcatgctccagg

SEQ ID NO: 4347 - DNA, 21 bp, Homo sapiens
  source 1..21: mol_type = other DNA
tgctcatcagcatgctcatgg

SEQ ID NO: 4348 - DNA, 22 bp, Homo sapiens
  source 1..22: mol_type = other DNA
gaatcacactccatgctcatgg

SEQ ID NO: 4349 - DNA, 23 bp, Homo sapiens
  source 1..23: mol_type = other DNA
gcctcacctctggatgcccaagg

SEQ ID NO: 4350 - DNA, 23 bp, Homo sapiens
  source 1..23: mol_type = other DNA
taccaacatctgcatgcttatgg

SEQ ID NO: 4351 - DNA, 23 bp, Homo sapiens
  source 1..23: mol_type = other DNA
tatactcctctgtatgcacatgg

SEQ ID NO: 4352 - DNA, 23 bp, Homo sapiens
  source 1..23: mol_type = other DNA
tttatacctttgcatgctcatag

SEQ ID NO: 4353 - DNA, 23 bp, Homo sapiens
  source 1..23: mol_type = other DNA
caagtacctctgcttgcccaggg

SEQ ID NO: 4354 - DNA, 23 bp, Homo sapiens
  source 1..23: mol_type = other DNA
tactcatctctgtatcccaaggc

SEQ ID NO: 4355 - DNA, 23 bp, Homo sapiens
  source 1..23: mol_type = other DNA
cactcacctccgcatcccaaagt

SEQ ID NO: 4356 - DNA, 22 bp, Homo sapiens
  source 1..22: mol_type = other DNA
ttgccaccactgcatctcaggg

SEQ ID NO: 4357 - DNA, 23 bp, Homo sapiens
  source 1..23: mol_type = other DNA
tgttcaccactgtatgctcagtg

SEQ ID NO: 4358 - DNA, 23 bp, Homo sapiens
  source 1..23: mol_type = other DNA
gagaaacccctgcatgctcagga

SEQ ID NO: 4359 - DNA, 23 bp, Homo sapiens
  source 1..23: mol_type = other DNA
gtgtatcctctgcctgctcaggg

SEQ ID NO: 4360 - DNA, 23 bp, Homo sapiens
  source 1..23: mol_type = other DNA
tactcaccccagcatgctcttct

SEQ ID NO: 4361 - DNA, 21 bp, Homo sapiens
  source 1..21: mol_type = other DNA
tattcatatgcatgctcacag

SEQ ID NO: 4362 - DNA, 22 bp, Homo sapiens
  source 1..22: mol_type = other DNA
tactatcctctcatgctcagtg

SEQ ID NO: 4363 - DNA, 23 bp, Homo sapiens
  source 1..23: mol_type = other DNA
ggcacacctctgcatgcttggtg

SEQ ID NO: 4364 - DNA, 23 bp, Homo sapiens
  source 1..23: mol_type = other DNA
tcctacactcagcatgcacatgg

SEQ ID NO: 4365 - DNA, 24 bp, Homo sapiens
  source 1..24: mol_type = other DNA
ttcttatctctgcatggctcatga

SEQ ID NO: 4366 - DNA, 21 bp, Homo sapiens
  source 1..21: mol_type = other DNA
tcctcacctctgtgctcaagg

SEQ ID NO: 4367 - DNA, 22 bp, Homo sapiens
  source 1..22: mol_type = other DNA
cactccctctgcatgcacatgc

SEQ ID NO: 4368 - DNA, 21 bp, Homo sapiens
  source 1..21: mol_type = other DNA
tgatcacctctgcactcatgg

SEQ ID NO: 4369 - DNA, 23 bp, Homo sapiens
  source 1..23: mol_type = other DNA
ttttaaactcaacatgctcatgg

SEQ ID NO: 4370 - DNA, 22 bp, Homo sapiens
  source 1..22: mol_type = other DNA
tttgcacctctgcaggtcaggg

SEQ ID NO: 4371 - DNA, 23 bp, Homo sapiens
  source 1..23: mol_type = other DNA
tacccacctctgcaagcccctgg

SEQ ID NO: 4372 - DNA, 21 bp, Homo sapiens
  source 1..21: mol_type = other DNA
gtctcacctccatgctcctgg

SEQ ID NO: 4373 - DNA, 23 bp, Homo sapiens
  source 1..23: mol_type = other DNA
aactgatctctgcatgcaccagg

SEQ ID NO: 4374 - DNA, 23 bp, Homo sapiens
  source 1..23: mol_type = other DNA
tgtacacccctgcacgctcatag

SEQ ID NO: 4375 - DNA, 23 bp, Homo sapiens
  source 1..23: mol_type = other DNA
ttcatatatctgcttgctcaggg

SEQ ID NO: 4376 - DNA, 22 bp, Homo sapiens
  source 1..22: mol_type = other DNA
tacccagtctgcatgcccagag

SEQ ID NO: 4377 - DNA, 22 bp, Homo sapiens
  source 1..22: mol_type = other DNA
taatacacctgcatgttcacgg

SEQ ID NO: 4378 - DNA, 23 bp, Homo sapiens
  source 1..23: mol_type = other DNA
aactcaccacttcattcttaatg

SEQ ID NO: 4379 - DNA, 22 bp, Homo sapiens
  source 1..22: mol_type = other DNA
ttatcacctctgcatctactgg

SEQ ID NO: 4380 - DNA, 24 bp, Homo sapiens
  source 1..24: mol_type = other DNA
tgcccaccctcagcatgctcagag

SEQ ID NO: 4381 - DNA, 22 bp, Homo sapiens
  source 1..22: mol_type = other DNA
aactctctccgcatgctcaggg

SEQ ID NO: 4382 - DNA, 23 bp, Homo sapiens
  source 1..23: mol_type = other DNA
ctcccatctctgcatgctccctg

SEQ ID NO: 4383 - DNA, 23 bp, Homo sapiens
  source 1..23: mol_type = other DNA
tccctaaccctgcatgcccaagg

SEQ ID NO: 4384 - DNA, 21 bp, Homo sapiens
  source 1..21: mol_type = other DNA
tacacacctgcaaactcaggg

SEQ ID NO: 4385 - DNA, 23 bp, Homo sapiens
  source 1..23: mol_type = other DNA
cactcacggcttcatgctgaaga

SEQ ID NO: 4386 - DNA, 22 bp, Homo sapiens
  source 1..22: mol_type = other DNA
ggcccacctctcatgctaaagg

SEQ ID NO: 4387 - DNA, 23 bp, Homo sapiens
  source 1..23: mol_type = other DNA
ccttgacctctccatgctcagga

SEQ ID NO: 4388 - DNA, 23 bp, Homo sapiens
  source 1..23: mol_type = other DNA
tatgtaccacagcatgcttacgg

SEQ ID NO: 4389 - DNA, 22 bp, Homo sapiens
  source 1..22: mol_type = other DNA
tgttcaccctgcatgctcatac

SEQ ID NO: 4390 - DNA, 23 bp, Homo sapiens
  source 1..23: mol_type = other DNA
atcccttctctgcatgctcatgt

SEQ ID NO: 4391 - DNA, 23 bp, Homo sapiens
  source 1..23: mol_type = other DNA
aactaaacactgcatactcatgg

SEQ ID NO: 4392 - DNA, 23 bp, Homo sapiens
  source 1..23: mol_type = other DNA
tgctcacctctgtgtgttcatgt

SEQ ID NO: 4393 - DNA, 24 bp, Homo sapiens
  source 1..24: mol_type = other DNA
tagtccactactgcatgctcaatg

SEQ ID NO: 4394 - DNA, 23 bp, Homo sapiens
  source 1..23: mol_type = other DNA
tccacactcctacatgctcatga

SEQ ID NO: 4395 - DNA, 23 bp, Homo sapiens
  source 1..23: mol_type = other DNA
tactaaactctacatgccctggg

SEQ ID NO: 4396 - DNA, 23 bp, Homo sapiens
  source 1..23: mol_type = other DNA
ccgtcacctcacaatgctcatgg

SEQ ID NO: 4397 - DNA, 22 bp, Homo sapiens
  source 1..22: mol_type = other DNA
taatcacactgcttgctcagtg

SEQ ID NO: 4398 - DNA, 22 bp, Homo sapiens
  source 1..22: mol_type = other DNA
cactacctctcctggctcatgg

SEQ ID NO: 4399 - DNA, 23 bp, Homo sapiens
  source 1..23: mol_type = other DNA
ttctctctcatgcatgcccacgg

SEQ ID NO: 4400 - DNA, 22 bp, Homo sapiens
  source 1..22: mol_type = other DNA
tacctcacctgcctgctcatgg

SEQ ID NO: 4401 - DNA, 22 bp, Homo sapiens
  source 1..22: mol_type = other DNA
ttctcaccctgcatgctcccgt

SEQ ID NO: 4402 - DNA, 23 bp, Homo sapiens
  source 1..23: mol_type = other DNA
cagtgacctctacatgttcaagt

SEQ ID NO: 4403 - DNA, 23 bp, Homo sapiens
  source 1..23: mol_type = other DNA
tccccaacacagcatactcaggg

SEQ ID NO: 4404 - DNA, 21 bp, Homo sapiens
  source 1..21: mol_type = other DNA
ttctcatctgcatgtacaagg

SEQ ID NO: 4405 - DNA, 21 bp, Homo sapiens
  source 1..21: mol_type = other DNA
tactcacatctgcatgtatgt

SEQ ID NO: 4406 - DNA, 23 bp, Homo sapiens
  source 1..23: mol_type = other DNA
tagacacaccttcatgctcgtgg

SEQ ID NO: 4407 - DNA, 22 bp, Homo sapiens
  source 1..22: mol_type = other DNA
gaaacacctctcctgctcatgg

SEQ ID NO: 4408 - DNA, 21 bp, Homo sapiens
  source 1..21: mol_type = other DNA
tactcagctctgcatttagag

SEQ ID NO: 4409 - DNA, 23 bp, Homo sapiens
  source 1..23: mol_type = other DNA
taccagcctcttcatgctcctga

SEQ ID NO: 4410 - DNA, 23 bp, Homo sapiens
  source 1..23: mol_type = other DNA
tacttacctctgtaatcccagcg

SEQ ID NO: 4411 - DNA, 23 bp, Homo sapiens
  source 1..23: mol_type = other DNA
taataacatcatcatgctcacgg

SEQ ID NO: 4412 - DNA, 22 bp, Homo sapiens
  source 1..22: mol_type = other DNA
tactgcctatgtttgctcaagg

SEQ ID NO: 4413 - DNA, 22 bp, Homo sapiens
  source 1..22: mol_type = other DNA
cactcacccctgcagctaatgt

SEQ ID NO: 4414 - DNA, 23 bp, Homo sapiens
  source 1..23: mol_type = other DNA
tcctcacctctgccttgtagagg

SEQ ID NO: 4415 - DNA, 23 bp, Homo sapiens
  source 1..23: mol_type = other DNA
tacccacttcatcatgctccatg

SEQ ID NO: 4416 - DNA, 23 bp, Homo sapiens
  source 1..23: mol_type = other DNA
ctctcatctctgtttgctcaagg

SEQ ID NO: 4417 - DNA, 23 bp, Homo sapiens
  source 1..23: mol_type = other DNA
aaggcacaactggatgctcaagg

SEQ ID NO: 4418 - DNA, 23 bp, Homo sapiens
  source 1..23: mol_type = other DNA
tagctacttctgcatgcttttgg

SEQ ID NO: 4419 - DNA, 23 bp, Homo sapiens
  source 1..23: mol_type = other DNA
caatcccatctacatgttcatgg

SEQ ID NO: 4420 - DNA, 23 bp, Homo sapiens
  source 1..23: mol_type = other DNA
caccccgctctgcgggctcacgg

SEQ ID NO: 4421 - DNA, 23 bp, Homo sapiens
  source 1..23: mol_type = other DNA
tactcacatctgtaatctcaaaa

SEQ ID NO: 4422 - DNA, 22 bp, Homo sapiens
  source 1..22: mol_type = other DNA
ttcttcctatccatgctcatgg

SEQ ID NO: 4423 - DNA, 22 bp, Homo sapiens
  source 1..22: mol_type = other DNA
cactcacctctcttgcgcatgg

SEQ ID NO: 4424 - DNA, 22 bp, Homo sapiens
  source 1..22: mol_type = other DNA
cacccacctcagcatctcaaag

SEQ ID NO: 4425 - DNA, 22 bp, Homo sapiens
  source 1..22: mol_type = other DNA
taatacctctgcatgctgcagt

SEQ ID NO: 4426 - DNA, 23 bp, Homo sapiens
  source 1..23: mol_type = other DNA
aactcccctctgcctggaccagg

SEQ ID NO: 4427 - DNA, 23 bp, Homo sapiens
  source 1..23: mol_type = other DNA
cacacacatatgcatgcacatgg

SEQ ID NO: 4428 - DNA, 23 bp, Homo sapiens
  source 1..23: mol_type = other DNA
cactcacctcagcctccccaagt

SEQ ID NO: 4429 - DNA, 23 bp, Homo sapiens
  source 1..23: mol_type = other DNA
tactcacatctgcctcctcccac

SEQ ID NO: 4430 - DNA, 22 bp, Homo sapiens
  source 1..22: mol_type = other DNA
ctctcacctcggcatcccaagg

SEQ ID NO: 4431 - DNA, 23 bp, Homo sapiens
  source 1..23: mol_type = other DNA
tattcaattatgcatgcttatgt

SEQ ID NO: 4432 - DNA, 23 bp, Homo sapiens
  source 1..23: mol_type = other DNA
atctcacatctccatgctctatg

SEQ ID NO: 4433 - DNA, 23 bp, Homo sapiens
  source 1..23: mol_type = other DNA
tactacctcctgcatgctcatgc

SEQ ID NO: 4434 - DNA, 22 bp, Homo sapiens
  source 1..22: mol_type = other DNA
aaatcacctctgcatgcctggt

SEQ ID NO: 4435 - DNA, 21 bp, Homo sapiens
  source 1..21: mol_type = other DNA
tacagctcttgatgctcaagg

SEQ ID NO: 4436 - DNA, 22 bp, Homo sapiens
  source 1..22: mol_type = other DNA
cgctcacctctgcctcccaagg

SEQ ID NO: 4437 - DNA, 23 bp, Homo sapiens
  source 1..23: mol_type = other DNA
tactcacctcggcgtcccaaagc

SEQ ID NO: 4438 - DNA, 22 bp, Homo sapiens
  source 1..22: mol_type = other DNA
tactacctatacaagcccatgg

SEQ ID NO: 4439 - DNA, 21 bp, Homo sapiens
  source 1..21: mol_type = other DNA
tactctcctccatgcacagtg

SEQ ID NO: 4440 - DNA, 23 bp, Homo sapiens
  source 1..23: mol_type = other DNA
tgcccatctctgcctgctggagg

SEQ ID NO: 4441 - DNA, 23 bp, Homo sapiens
  source 1..23: mol_type = other DNA
gacacaacattccatgctcatgg

SEQ ID NO: 4442 - DNA, 23 bp, Homo sapiens
  source 1..23: mol_type = other DNA
ggttcaccactgcatcttcaggg

SEQ ID NO: 4443 - DNA, 25 bp, Homo sapiens
  source 1..25: mol_type = other DNA
ggctcacctctgcatttgctcaaga

SEQ ID NO: 4444 - DNA, 21 bp, Homo sapiens
  source 1..21: mol_type = other DNA
tacccacctctattgtcaagg

SEQ ID NO: 4445 - DNA, 22 bp, Homo sapiens
  source 1..22: mol_type = other DNA
cactcacattgcatgctcaaag

SEQ ID NO: 4446 - DNA, 23 bp, Homo sapiens
  source 1..23: mol_type = other DNA
tactcaccactgcatcccaagga

SEQ ID NO: 4447 - DNA, 24 bp, Homo sapiens
  source 1..24: mol_type = other DNA
tcctcttactctacatgctcatgg

SEQ ID NO: 4448 - DNA, 23 bp, Homo sapiens
  source 1..23: mol_type = other DNA
tactcaccccttcatgtcagggg

SEQ ID NO: 4449 - DNA, 23 bp, Homo sapiens
  source 1..23: mol_type = other DNA
tattcacatctgcatgcatagag

SEQ ID NO: 4450 - DNA, 22 bp, Homo sapiens
  source 1..22: mol_type = other DNA
tactcaactctgctgctctagg

SEQ ID NO: 4451 - DNA, 23 bp, Homo sapiens
  source 1..23: mol_type = other DNA
cattcaccactgcatgcccaaag

SEQ ID NO: 4452 - DNA, 21 bp, Homo sapiens
  source 1..21: mol_type = other DNA
ttctcacatgcatgctcagtg

SEQ ID NO: 4453 - DNA, 22 bp, Homo sapiens
  source 1..22: mol_type = other DNA
cacttaccctacatgctcaaag

SEQ ID NO: 4454 - DNA, 22 bp, Homo sapiens
  source 1..22: mol_type = other DNA
tattcacctctgcatctcagtg

SEQ ID NO: 4455 - DNA, 22 bp, Homo sapiens
  source 1..22: mol_type = other DNA
tacccacctcagcatcccacgg

SEQ ID NO: 4456 - DNA, 22 bp, Homo sapiens
  source 1..22: mol_type = other DNA
ttctcacctccacatctcaagg

SEQ ID NO: 4457 - DNA, 22 bp, Homo sapiens
  source 1..22: mol_type = other DNA
tactcactatgcatgcattagg

SEQ ID NO: 4458 - DNA, 23 bp, Homo sapiens
  source 1..23: mol_type = other DNA
aatgtacctctgcatgccctagg

SEQ ID NO: 4459 - DNA, 24 bp, Homo sapiens
  source 1..24: mol_type = other DNA
tactcaccaactgcatggtcaggg

SEQ ID NO: 4460 - DNA, 24 bp, Homo sapiens
  source 1..24: mol_type = other DNA
tgctatactctagcatgctcatgg

SEQ ID NO: 4461 - DNA, 22 bp, Homo sapiens
  source 1..22: mol_type = other DNA
tactctctctgcttgctctttg

SEQ ID NO: 4462 - DNA, 23 bp, Homo sapiens
  source 1..23: mol_type = other DNA
catacacccctgcatgtacacgg

SEQ ID NO: 4463 - DNA, 23 bp, Homo sapiens
  source 1..23: mol_type = other DNA
caggcaccactgcatgctcctgg

SEQ ID NO: 4464 - DNA, 22 bp, Homo sapiens
  source 1..22: mol_type = other DNA
cactcacctctcatgctcacac

SEQ ID NO: 4465 - DNA, 23 bp, Homo sapiens
  source 1..23: mol_type = other DNA
tacacatacatgcatgctcttgg

SEQ ID NO: 4466 - DNA, 23 bp, Homo sapiens
  source 1..23: mol_type = other DNA
tacctacctctgcatcctcaggg

SEQ ID NO: 4467 - DNA, 23 bp, Homo sapiens
  source 1..23: mol_type = other DNA
tactcacgtctgcacgcttctgg

SEQ ID NO: 4468 - DNA, 23 bp, Homo sapiens
  source 1..23: mol_type = other DNA
tacccacctctgctaacccaagg

SEQ ID NO: 4469 - DNA, 22 bp, Homo sapiens
  source 1..22: mol_type = other DNA
cccacacctctgctgcccaagg

SEQ ID NO: 4470 - DNA, 21 bp, Homo sapiens
  source 1..21: mol_type = other DNA
tattcctctccatgcccaagg

SEQ ID NO: 4471 - DNA, 22 bp, Homo sapiens
  source 1..22: mol_type = other DNA
tactcacagggcaagctcatgg

SEQ ID NO: 4472 - DNA, 23 bp, Homo sapiens
  source 1..23: mol_type = other DNA
tcttctcctaagcatgctcagga

SEQ ID NO: 4473 - DNA, 22 bp, Homo sapiens
  source 1..22: mol_type = other DNA
ttgccacccctgcagctcatgg

SEQ ID NO: 4474 - DNA, 23 bp, Homo sapiens
  source 1..23: mol_type = other DNA
taatccactctgcttgctcaagg

SEQ ID NO: 4475 - DNA, 22 bp, Homo sapiens
  source 1..22: mol_type = other DNA
gaatcacctttgcatctcaggg

SEQ ID NO: 4476 - DNA, 23 bp, Homo sapiens
  source 1..23: mol_type = other DNA
tactccactctgcatgtcaatgt

SEQ ID NO: 4477 - DNA, 22 bp, Homo sapiens
  source 1..22: mol_type = other DNA
atttcacctctgcatgccacag

SEQ ID NO: 4478 - DNA, 23 bp, Homo sapiens
  source 1..23: mol_type = other DNA
cacacctctctacatgctcactg

SEQ ID NO: 4479 - DNA, 23 bp, Homo sapiens
  source 1..23: mol_type = other DNA
aatatgcatctgcatgctcaagg

SEQ ID NO: 4480 - DNA, 21 bp, Homo sapiens
  source 1..21: mol_type = other DNA
cacccacccccatgctcacgg

SEQ ID NO: 4481 - DNA, 23 bp, Homo sapiens
  source 1..23: mol_type = other DNA
ccctcacatacacatgctcatgg

SEQ ID NO: 4482 - DNA, 23 bp, Homo sapiens
  source 1..23: mol_type = other DNA
atctcacctctccaagcttatgg

SEQ ID NO: 4483 - DNA, 23 bp, Homo sapiens
  source 1..23: mol_type = other DNA
tatttcactctgcatgttcatga

SEQ ID NO: 4484 - DNA, 21 bp, Homo sapiens
  source 1..21: mol_type = other DNA
tcattacctccatgctcatgg

SEQ ID NO: 4485 - DNA, 23 bp, Homo sapiens
  source 1..23: mol_type = other DNA
tacccacctctgcctcccaaggt

SEQ ID NO: 4486 - DNA, 24 bp, Homo sapiens
  source 1..24: mol_type = other DNA
tacttgactctggcatgctcaggg

SEQ ID NO: 4487 - DNA, 22 bp, Homo sapiens
  source 1..22: mol_type = other DNA
cactcacctgccatgttcacgg

SEQ ID NO: 4488 - DNA, 22 bp, Homo sapiens
  source 1..22: mol_type = other DNA
tactcacctatcaagctcagga

SEQ ID NO: 4489 - DNA, 23 bp, Homo sapiens
  source 1..23: mol_type = other DNA
cactcatctctacatgaacaagg

SEQ ID NO: 4490 - DNA, 23 bp, Homo sapiens
  source 1..23: mol_type = other DNA
cactcacctctgcatgcccagct

SEQ ID NO: 4491 - DNA, 23 bp, Homo sapiens
  source 1..23: mol_type = other DNA
ttattacctctgtaggctcagag

SEQ ID NO: 4492 - DNA, 23 bp, Homo sapiens
  source 1..23: mol_type = other DNA
taatcaccactgcatgtgcccgg

SEQ ID NO: 4493 - DNA, 22 bp, Homo sapiens
  source 1..22: mol_type = other DNA
taataactttgcatgttcatgg

SEQ ID NO: 4494 - DNA, 22 bp, Homo sapiens
  source 1..22: mol_type = other DNA
cactccctctgcatgttcctgg

SEQ ID NO: 4495 - DNA, 23 bp, Homo sapiens
  source 1..23: mol_type = other DNA
gaccatccattgcatgctcaagg

SEQ ID NO: 4496 - DNA, 22 bp, Homo sapiens
  source 1..22: mol_type = other DNA
gacacagtctgtatgctcatgg

SEQ ID NO: 4497 - DNA, 23 bp, Homo sapiens
  source 1..23: mol_type = other DNA
ctcccaccactgcatgctgaagg

SEQ ID NO: 4498 - DNA, 23 bp, Homo sapiens
  source 1..23: mol_type = other DNA
tcatcaccactgcctgctcacag

SEQ ID NO: 4499 - DNA, 23 bp, Homo sapiens
  source 1..23: mol_type = other DNA
gtgtgacctctgcatgttcatga

SEQ ID NO: 4500 - DNA, 23 bp, Homo sapiens
  source 1..23: mol_type = other DNA
tattcacttctccatgctcacag

SEQ ID NO: 4501 - DNA, 22 bp, Homo sapiens
  source 1..22: mol_type = other DNA
gagtgactctgcatgcttaagg

SEQ ID NO: 4502 - DNA, 23 bp, Homo sapiens
  source 1..23: mol_type = other DNA
tgttcctcagtgcatgctcatgg

SEQ ID NO: 4503 - DNA, 22 bp, Homo sapiens
  source 1..22: mol_type = other DNA
cgttcacttctgcatgtcaagg

SEQ ID NO: 4504 - DNA, 23 bp, Homo sapiens
  source 1..23: mol_type = other DNA
ttccagcctctgcatggtcatgg

SEQ ID NO: 4505 - DNA, 23 bp, Homo sapiens
  source 1..23: mol_type = other DNA
ttctagagtctgcatgctcttgg

SEQ ID NO: 4506 - DNA, 22 bp, Homo sapiens
  source 1..22: mol_type = other DNA
aacccaccctgcatgctctggt

SEQ ID NO: 4507 - DNA, 22 bp, Homo sapiens
  source 1..22: mol_type = other DNA
acatcagctctgcagctcaggg

SEQ ID NO: 4508 - DNA, 22 bp, Homo sapiens
  source 1..22: mol_type = other DNA
tgctcacttctgcatctcaaag

SEQ ID NO: 4509 - DNA, 23 bp, Homo sapiens
  source 1..23: mol_type = other DNA
cacacacttctacatactcaagg

SEQ ID NO: 4510 - DNA, 22 bp, Homo sapiens
  source 1..22: mol_type = other DNA
ctctcacctcagcatctcaaga

SEQ ID NO: 4511 - DNA, 21 bp, Homo sapiens
  source 1..21: mol_type = other DNA
gacacacctgcatgcacaagg

SEQ ID NO: 4512 - DNA, 23 bp, Homo sapiens
  source 1..23: mol_type = other DNA
gtttcaccttggcatgctcaaag

SEQ ID NO: 4513 - DNA, 23 bp, Homo sapiens
  source 1..23: mol_type = other DNA
tcctcaccattgtacgctcaggg

SEQ ID NO: 4514 - DNA, 22 bp, Homo sapiens
  source 1..22: mol_type = other DNA
cacccacctcagcatcccaagg

SEQ ID NO: 4515 - DNA, 23 bp, Homo sapiens
  source 1..23: mol_type = other DNA
tacagacttatacatgctctggg

SEQ ID NO: 4516 - DNA, 23 bp, Homo sapiens
  source 1..23: mol_type = other DNA
tacccacatctccatgctccatc

SEQ ID NO: 4517 - DNA, 22 bp, Homo sapiens
  source 1..22: mol_type = other DNA
tgccacgtgtgtatgctcaggg

SEQ ID NO: 4518 - DNA, 22 bp, Homo sapiens
  source 1..22: mol_type = other DNA
cacccacctcagcagctcaggt

SEQ ID NO: 4519 - DNA, 23 bp, Homo sapiens
  source 1..23: mol_type = other DNA
tgataaactcagcatgctccagg

SEQ ID NO: 4520 - DNA, 24 bp, Homo sapiens
  source 1..24: mol_type = other DNA
tactacaacactgaatgctgaggg

SEQ ID NO: 4521 - DNA, 23 bp, Homo sapiens
  source 1..23: mol_type = other DNA
caaacacctctgactgctcaggg

SEQ ID NO: 4522 - DNA, 23 bp, Homo sapiens
  source 1..23: mol_type = other DNA
tattcatcactacatgctgacag

SEQ ID NO: 4523 - DNA, 22 bp, Homo sapiens
  source 1..22: mol_type = other DNA
gacctccactgcatgctgatgg

SEQ ID NO: 4524 - DNA, 22 bp, Homo sapiens
  source 1..22: mol_type = other DNA
cactctactctgcagcttaagg

SEQ ID NO: 4525 - DNA, 22 bp, Homo sapiens
  source 1..22: mol_type = other DNA
aactcaccatgaatgctcttgg

SEQ ID NO: 4526 - DNA, 23 bp, Homo sapiens
  source 1..23: mol_type = other DNA
tactcacctttgcatccctccgg

SEQ ID NO: 4527 - DNA, 23 bp, Homo sapiens
  source 1..23: mol_type = other DNA
ctagcacctgtccatgctcatgg

SEQ ID NO: 4528 - DNA, 23 bp, Homo sapiens
  source 1..23: mol_type = other DNA
tattcaccactgcatgttatttg

SEQ ID NO: 4529 - DNA, 23 bp, Homo sapiens
  source 1..23: mol_type = other DNA
tactcatctctggatgaacatgg

SEQ ID NO: 4530 - DNA, 23 bp, Homo sapiens
  source 1..23: mol_type = other DNA
cactattttctccatgctcaggg

SEQ ID NO: 4531 - DNA, 23 bp, Homo sapiens
  source 1..23: mol_type = other DNA
gcctctactctgaatgctcaagt

SEQ ID NO: 4532 - DNA, 22 bp, Homo sapiens
  source 1..22: mol_type = other DNA
aagtcactatgcatgcccaagg

SEQ ID NO: 4533 - DNA, 23 bp, Homo sapiens
  source 1..23: mol_type = other DNA
cactcacctcatcttgctcacta

SEQ ID NO: 4534 - DNA, 23 bp, Homo sapiens
  source 1..23: mol_type = other DNA
cactcacctcagcctgccaaagt

SEQ ID NO: 4535 - DNA, 23 bp, Homo sapiens
  source 1..23: mol_type = other DNA
cagtcacctctgcatacccaagc

SEQ ID NO: 4536 - DNA, 22 bp, Homo sapiens
  source 1..22: mol_type = other DNA
gacttatctctgcatgtctagg

SEQ ID NO: 4537 - DNA, 22 bp, Homo sapiens
  source 1..22: mol_type = other DNA
ggctcacctctgctgtacatgg

SEQ ID NO: 4538 - DNA, 23 bp, Homo sapiens
  source 1..23: mol_type = other DNA
gactgacctctgcatgggcagca

SEQ ID NO: 4539 - DNA, 23 bp, Homo sapiens
  source 1..23: mol_type = other DNA
tactcacttcagcagcctcccgt

SEQ ID NO: 4540 - DNA, 23 bp, Homo sapiens
  source 1..23: mol_type = other DNA
aaaacacatctggatgctcatga

SEQ ID NO: 4541 - DNA, 22 bp, Homo sapiens
  source 1..22: mol_type = other DNA
taaatacttctgcatgccaggg

SEQ ID NO: 4542 - DNA, 22 bp, Homo sapiens
  source 1..22: mol_type = other DNA
tattcatctctgcatctaagga

SEQ ID NO: 4543 - DNA, 23 bp, Homo sapiens
  source 1..23: mol_type = other DNA
tactcacaggtgcatgcacatgc

SEQ ID NO: 4544 - DNA, 22 bp, Homo sapiens
  source 1..22: mol_type = other DNA
ttctcaccctgcatgatcatca

SEQ ID NO: 4545 - DNA, 23 bp, Homo sapiens
  source 1..23: mol_type = other DNA
tactcagatcttcattctcaaga

SEQ ID NO: 4546 - DNA, 23 bp, Homo sapiens
  source 1..23: mol_type = other DNA
tactgtcatctgcatgatttagg

SEQ ID NO: 4547 - DNA, 23 bp, Homo sapiens
  source 1..23: mol_type = other DNA
taaaaatctatgcatgctcaaga

SEQ ID NO: 4548 - DNA, 23 bp, Homo sapiens
  source 1..23: mol_type = other DNA
tactctctactgcattctaagga

SEQ ID NO: 4549 - DNA, 23 bp, Homo sapiens
  source 1..23: mol_type = other DNA
caatcacatgtgcatgcacaagt

SEQ ID NO: 4550 - DNA, 22 bp, Homo sapiens
  source 1..22: mol_type = other DNA
tacactactctgcctctcaagg

SEQ ID NO: 4551 - DNA, 23 bp, Homo sapiens
  source 1..23: mol_type = other DNA
tactcacctctgccttcctttgt

SEQ ID NO: 4552 - DNA, 22 bp, Homo sapiens
  source 1..22: mol_type = other DNA
ttatcaccctgcatgttcaggg

SEQ ID NO: 4553 - DNA, 23 bp, Homo sapiens
  source 1..23: mol_type = other DNA
tacatacatctgcatgctcatga

SEQ ID NO: 4554 - DNA, 22 bp, Homo sapiens
  source 1..22: mol_type = other DNA
aactcacctctgcattacatgg

SEQ ID NO: 4555 - DNA, 23 bp, Homo sapiens
  source 1..23: mol_type = other DNA
tactcagttctgcatgatcaggg

SEQ ID NO: 4556 - DNA, 23 bp, Homo sapiens
  source 1..23: mol_type = other DNA
tacccacctctgcatcccaaagt

SEQ ID NO: 4557 - DNA, 23 bp, Homo sapiens
  source 1..23: mol_type = other DNA
ctttcaccactgcatgttcttgg

SEQ ID NO: 4558 - DNA, 23 bp, Homo sapiens
  source 1..23: mol_type = other DNA
gccgtacctcagcatgctcaagg

SEQ ID NO: 4559 - DNA, 23 bp, Homo sapiens
  source 1..23: mol_type = other DNA
tgtctacctatgcatgcacatgg

SEQ ID NO: 4560 - DNA, 22 bp, Homo sapiens
  source 1..22: mol_type = other DNA
aactacatctgcatgctctaag

SEQ ID NO: 4561 - DNA, 23 bp, Homo sapiens
  source 1..23: mol_type = other DNA
tgaccacctctgcatgctcctgg

SEQ ID NO: 4562 - DNA, 24 bp, Homo sapiens
  source 1..24: mol_type = other DNA
cagtcacctctgcatggctcagag

SEQ ID NO: 4563 - DNA, 23 bp, Homo sapiens
  source 1..23: mol_type = other DNA
ttgtcacctctgcatagacaagg

SEQ ID NO: 4564 - DNA, 22 bp, Homo sapiens
  source 1..22: mol_type = other DNA
gcttcatctctcatgctcatgg

SEQ ID NO: 4565 - DNA, 24 bp, Homo sapiens
  source 1..24: mol_type = other DNA
tattaactcactgcatgctcacag

SEQ ID NO: 4566 - DNA, 22 bp, Homo sapiens
  source 1..22: mol_type = other DNA
ttcctacctctgcatgtcaaag

SEQ ID NO: 4567 - DNA, 23 bp, Homo sapiens
  source 1..23: mol_type = other DNA
tccttttatctccatgctcaggg

SEQ ID NO: 4568 - DNA, 21 bp, Homo sapiens
  source 1..21: mol_type = other DNA
cactcacctccatgcccacgg

SEQ ID NO: 4569 - DNA, 22 bp, Homo sapiens
  source 1..22: mol_type = other DNA
tgctccctacacatgctcaagg

SEQ ID NO: 4570 - DNA, 23 bp, Homo sapiens
  source 1..23: mol_type = other DNA
aattcacctctacatggttcagg

SEQ ID NO: 4571 - DNA, 22 bp, Homo sapiens
  source 1..22: mol_type = other DNA
aaaacacctctgcatgtcaggg

SEQ ID NO: 4572 - DNA, 22 bp, Homo sapiens
  source 1..22: mol_type = other DNA
gaaacacactgcatgctcatgg

SEQ ID NO: 4573 - DNA, 23 bp, Homo sapiens
  source 1..23: mol_type = other DNA
tgcatacatatacatgctcatgg

SEQ ID NO: 4574 - DNA, 23 bp, Homo sapiens
  source 1..23: mol_type = other DNA
tcctccctcatgcatgctcatag

SEQ ID NO: 4575 - DNA, 22 bp, Homo sapiens
  source 1..22: mol_type = other DNA
ttctcactctacttgctcaagg

SEQ ID NO: 4576 - DNA, 22 bp, Homo sapiens
  source 1..22: mol_type = other DNA
tcctcactctgcaggctcaggg

SEQ ID NO: 4577 - DNA, 22 bp, Homo sapiens
  source 1..22: mol_type = other DNA
tcctcacattgcacgctcaggg

SEQ ID NO: 4578 - DNA, 22 bp, Homo sapiens
  source 1..22: mol_type = other DNA
taattacctctgcatctcgggg

SEQ ID NO: 4579 - DNA, 22 bp, Homo sapiens
  source 1..22: mol_type = other DNA
cattcacctctgcatctcagcg

SEQ ID NO: 4580 - DNA, 22 bp, Homo sapiens
  source 1..22: mol_type = other DNA
aactcaccctgcataatcactg

SEQ ID NO: 4581 - DNA, 23 bp, Homo sapiens
  source 1..23: mol_type = other DNA
tagatacccctgcatgctttggg

SEQ ID NO: 4582 - DNA, 22 bp, Homo sapiens
  source 1..22: mol_type = other DNA
caaacacatctcatgctcatgg

SEQ ID NO: 4583 - DNA, 23 bp, Homo sapiens
  source 1..23: mol_type = other DNA
catcatcatctgcatgctcaagg

SEQ ID NO: 4584 - DNA, 24 bp, Homo sapiens
  source 1..24: mol_type = other DNA
cactcacctctagcctgctcacgg

SEQ ID NO: 4585 - DNA, 22 bp, Homo sapiens
  source 1..22: mol_type = other DNA
gtttcaccactgcatgccatgg

SEQ ID NO: 4586 - DNA, 23 bp, Homo sapiens
  source 1..23: mol_type = other DNA
taataccatcaccatgctcaagg

SEQ ID NO: 4587 - DNA, 22 bp, Homo sapiens
  source 1..22: mol_type = other DNA
ttctcactactgcatgtcaaag

SEQ ID NO: 4588 - DNA, 23 bp, Homo sapiens
  source 1..23: mol_type = other DNA
aactcacctctgcattcatcttg

SEQ ID NO: 4589 - DNA, 23 bp, Homo sapiens
  source 1..23: mol_type = other DNA
ttttcaccactgtatgttcatgg

SEQ ID NO: 4590 - DNA, 23 bp, Homo sapiens
  source 1..23: mol_type = other DNA
tacattcatctgcatgctcagaa

SEQ ID NO: 4591 - DNA, 23 bp, Homo sapiens
  source 1..23: mol_type = other DNA
tcctcacctctatatgctcaaca

SEQ ID NO: 4592 - DNA, 24 bp, Homo sapiens
  source 1..24: mol_type = other DNA
ctctcacctcagacatgctcagag

SEQ ID NO: 4593 - DNA, 22 bp, Homo sapiens
  source 1..22: mol_type = other DNA
aagtcaccacacatgctcaggg

SEQ ID NO: 4594 - DNA, 22 bp, Homo sapiens
  source 1..22: mol_type = other DNA
tgctacctttgcatggtcaggg

SEQ ID NO: 4595 - DNA, 22 bp, Homo sapiens
  source 1..22: mol_type = other DNA
tactcaatctgcatattcagag

SEQ ID NO: 4596 - DNA, 21 bp, Homo sapiens
  source 1..21: mol_type = other DNA
ctctcacctctgctctcaagg

SEQ ID NO: 4597 - DNA, 23 bp, Homo sapiens
  source 1..23: mol_type = other DNA
caaacccctctgcatgctcaagc

SEQ ID NO: 4598 - DNA, 23 bp, Homo sapiens
  source 1..23: mol_type = other DNA
aaagttcccctgcatgctcaggg

SEQ ID NO: 4599 - DNA, 22 bp, Homo sapiens
  source 1..22: mol_type = other DNA
gactgattctgtatgctcacgg

SEQ ID NO: 4600 - DNA, 22 bp, Homo sapiens
  source 1..22: mol_type = other DNA
tactctcctctaatgctctagg

SEQ ID NO: 4601 - DNA, 23 bp, Homo sapiens
  source 1..23: mol_type = other DNA
gcctcacccccacatgctcctgg

SEQ ID NO: 4602 - DNA, 23 bp, Homo sapiens
  source 1..23: mol_type = other DNA
tgttgatctctgcatgttcaggg

SEQ ID NO: 4603 - DNA, 23 bp, Homo sapiens
  source 1..23: mol_type = other DNA
cactcatctctgcaagctccagg

SEQ ID NO: 4604 - DNA, 23 bp, Homo sapiens
  source 1..23: mol_type = other DNA
tactccacttcacatgctcagag

SEQ ID NO: 4605 - DNA, 22 bp, Homo sapiens
  source 1..22: mol_type = other DNA
tacacatactgcatgctcaggt

SEQ ID NO: 4606 - DNA, 23 bp, Homo sapiens
  source 1..23: mol_type = other DNA
cactcaccactgtatgttcagag

SEQ ID NO: 4607 - DNA, 22 bp, Homo sapiens
  source 1..22: mol_type = other DNA
tgctcagcaggcatgctcaggg

SEQ ID NO: 4608 - DNA, 23 bp, Homo sapiens
  source 1..23: mol_type = other DNA
taaccccctctacttgctcaggg

SEQ ID NO: 4609 - DNA, 21 bp, Homo sapiens
  source 1..21: mol_type = other DNA
taatcatctgcatactcacag

SEQ ID NO: 4610 - DNA, 23 bp, Homo sapiens
  source 1..23: mol_type = other DNA
tgtgcacctctgcatgcccaggt

SEQ ID NO: 4611 - DNA, 24 bp, Homo sapiens
  source 1..24: mol_type = other DNA
cagtcacactgtgcatactcaagg

SEQ ID NO: 4612 - DNA, 22 bp, Homo sapiens
  source 1..22: mol_type = other DNA
tacacagtttgcatgctcttgg

SEQ ID NO: 4613 - DNA, 22 bp, Homo sapiens
  source 1..22: mol_type = other DNA
tactcaaactgcgtgctcttgg

SEQ ID NO: 4614 - DNA, 22 bp, Homo sapiens
  source 1..22: mol_type = other DNA
gacaaacctatcatgctcacgg

SEQ ID NO: 4615 - DNA, 22 bp, Homo sapiens
  source 1..22: mol_type = other DNA
gaataaccttccatgctcatgg

SEQ ID NO: 4616 - DNA, 22 bp, Homo sapiens
  source 1..22: mol_type = other DNA
ttttcacctctactactcaggg

SEQ ID NO: 4617 - DNA, 24 bp, Homo sapiens
  source 1..24: mol_type = other DNA
ttctcaacctcaacatgttcaagg

SEQ ID NO: 4618 - DNA, 23 bp, Homo sapiens
  source 1..23: mol_type = other DNA
tactcacctctccaagctcaatt

SEQ ID NO: 4619 - DNA, 23 bp, Homo sapiens
  source 1..23: mol_type = other DNA
ttcttccctatgcaggctcctgg

SEQ ID NO: 4620 - DNA, 23 bp, Homo sapiens
  source 1..23: mol_type = other DNA
cactccattcttcatgctcaggg

SEQ ID NO: 4621 - DNA, 23 bp, Homo sapiens
  source 1..23: mol_type = other DNA
ccctcaccactccatgttcatgc

SEQ ID NO: 4622 - DNA, 23 bp, Homo sapiens
  source 1..23: mol_type = other DNA
tactcaccccaggcagctcatgg

SEQ ID NO: 4623 - DNA, 22 bp, Homo sapiens
  source 1..22: mol_type = other DNA
tacgcaccctccctgctcaagg

SEQ ID NO: 4624 - DNA, 22 bp, Homo sapiens
  source 1..22: mol_type = other DNA
cacacagctctgctgctcaggg

SEQ ID NO: 4625 - DNA, 22 bp, Homo sapiens
  source 1..22: mol_type = other DNA
tactcacccttacatctcctgg

SEQ ID NO: 4626 - DNA, 22 bp, Homo sapiens
  source 1..22: mol_type = other DNA
agctcacctctgcttctcttgg

SEQ ID NO: 4627 - DNA, 23 bp, Homo sapiens
  source 1..23: mol_type = other DNA
taagcacctccacatgttcatga

SEQ ID NO: 4628 - DNA, 23 bp, Homo sapiens
  source 1..23: mol_type = other DNA
tgttcacctctgcagtctcatag

SEQ ID NO: 4629 - DNA, 23 bp, Homo sapiens
  source 1..23: mol_type = other DNA
tgctcaccagtccatgctcatgg

SEQ ID NO: 4630 - DNA, 24 bp, Homo sapiens
  source 1..24: mol_type = other DNA
cactcacaatctgcatgcagaggg

SEQ ID NO: 4631 - DNA, 23 bp, Homo sapiens
  source 1..23: mol_type = other DNA
tactcatctctgtctggtcaggg

SEQ ID NO: 4632 - DNA, 23 bp, Homo sapiens
  source 1..23: mol_type = other DNA
tgcagaactcctcatgctcaggg

SEQ ID NO: 4633 - DNA, 22 bp, Homo sapiens
  source 1..22: mol_type = other DNA
ttctacctgtggatgttcaggg

SEQ ID NO: 4634 - DNA, 22 bp, Homo sapiens
  source 1..22: mol_type = other DNA
aacttcctctgcatgcccaggc

SEQ ID NO: 4635 - DNA, 22 bp, Homo sapiens
  source 1..22: mol_type = other DNA
tactcactctacaagctcaaat

SEQ ID NO: 4636 - DNA, 22 bp, Homo sapiens
  source 1..22: mol_type = other DNA
tattaacctctgatgcttatga

SEQ ID NO: 4637 - DNA, 23 bp, Homo sapiens
  source 1..23: mol_type = other DNA
tacaaaaccctgcatgcttatgt

SEQ ID NO: 4638 - DNA, 23 bp, Homo sapiens
  source 1..23: mol_type = other DNA
ttctcacctcctgctgctcacag

SEQ ID NO: 4639 - DNA, 23 bp, Homo sapiens
  source 1..23: mol_type = other DNA
ctctcacctctgcagcaccatgg

SEQ ID NO: 4640 - DNA, 23 bp, Homo sapiens
  source 1..23: mol_type = other DNA
tactcacctcagtatctcctggg

SEQ ID NO: 4641 - DNA, 23 bp, Homo sapiens
  source 1..23: mol_type = other DNA
tacaaaccaatgcatgctcattg

SEQ ID NO: 4642 - DNA, 23 bp, Homo sapiens
  source 1..23: mol_type = other DNA
aatgcaccgctgcctgcccaggg

SEQ ID NO: 4643 - DNA, 23 bp, Homo sapiens
  source 1..23: mol_type = other DNA
tattccactctacatgtccatgg

SEQ ID NO: 4644 - DNA, 23 bp, Homo sapiens
  source 1..23: mol_type = other DNA
ttttcacctctgcatattccagt

SEQ ID NO: 4645 - DNA, 22 bp, Homo sapiens
  source 1..22: mol_type = other DNA
tgctcactctgcagggtcaggg

SEQ ID NO: 4646 - DNA, 22 bp, Homo sapiens
  source 1..22: mol_type = other DNA
tactcattttgcatgttcgagg

SEQ ID NO: 4647 - DNA, 22 bp, Homo sapiens
  source 1..22: mol_type = other DNA
tactcaccctgctagctgaaga

SEQ ID NO: 4648 - DNA, 23 bp, Homo sapiens
  source 1..23: mol_type = other DNA
tatttccatatgcatgcacatgg

SEQ ID NO: 4649 - DNA, 23 bp, Homo sapiens
  source 1..23: mol_type = other DNA
cactcacctcggcctccccaagg

SEQ ID NO: 4650 - DNA, 22 bp, Homo sapiens
  source 1..22: mol_type = other DNA
ttcttactctgcatgcctacgg

SEQ ID NO: 4651 - DNA, 22 bp, Homo sapiens
  source 1..22: mol_type = other DNA
taatcacctcccatggtctggg

SEQ ID NO: 4652 - DNA, 22 bp, Homo sapiens
  source 1..22: mol_type = other DNA
tactcacctctgtatcccaggt

SEQ ID NO: 4653 - DNA, 22 bp, Homo sapiens
  source 1..22: mol_type = other DNA
tacccacctcagcatcccagag

SEQ ID NO: 4654 - DNA, 22 bp, Homo sapiens
  source 1..22: mol_type = other DNA
tactcatctctccatctcttgg

SEQ ID NO: 4655 - DNA, 23 bp, Homo sapiens
  source 1..23: mol_type = other DNA
tcctcacgtcaggatcctcacag

SEQ ID NO: 4656 - DNA, 23 bp, Homo sapiens
  source 1..23: mol_type = other DNA
tagtcaaacctgcatgttcctgg

SEQ ID NO: 4657 - DNA, 23 bp, Homo sapiens
  source 1..23: mol_type = other DNA
tacatatttctgtatgttcacgg

SEQ ID NO: 4658 - DNA, 23 bp, Homo sapiens
  source 1..23: mol_type = other DNA
aactcatctcctcatacccaggg

SEQ ID NO: 4659 - DNA, 25 bp, Homo sapiens
  source 1..25: mol_type = other DNA
tactagcacctctgcaaggttagtg

SEQ ID NO: 4660 - DNA, 22 bp, Homo sapiens
  source 1..22: mol_type = other DNA
tgcccacctctgcctcccaagg

SEQ ID NO: 4661 - DNA, 23 bp, Homo sapiens
  source 1..23: mol_type = other DNA
aactcacctctgagtgcaaaggc

SEQ ID NO: 4662 - DNA, 23 bp, Homo sapiens
  source 1..23: mol_type = other DNA
tacttatctgtccattgtcaagg

SEQ ID NO: 4663 - DNA, 23 bp, Homo sapiens
  source 1..23: mol_type = other DNA
aactctcctcttcatgcccaccc

SEQ ID NO: 4664 - DNA, 22 bp, Homo sapiens
  source 1..22: mol_type = other DNA
tactgacctctgatgctgcatg

SEQ ID NO: 4665 - DNA, 21 bp, Homo sapiens
  source 1..21: mol_type = other DNA
tactcatctgaatactcaagc

SEQ ID NO: 4666 - DNA, 23 bp, Homo sapiens
  source 1..23: mol_type = other DNA
tactacaccatgcatggtcatgg

SEQ ID NO: 4667 - DNA, 23 bp, Homo sapiens
  source 1..23: mol_type = other DNA
gcctcacctctgcatgctccgtg

SEQ ID NO: 4668 - DNA, 22 bp, Homo sapiens
  source 1..22: mol_type = other DNA
gactcacctctgcttctcacgg

SEQ ID NO: 4669 - DNA, 23 bp, Homo sapiens
  source 1..23: mol_type = other DNA
cactacactctacatgctcctgg

SEQ ID NO: 4670 - DNA, 22 bp, Homo sapiens
  source 1..22: mol_type = other DNA
atatcacctctgctactcatgg

SEQ ID NO: 4671 - DNA, 23 bp, Homo sapiens
  source 1..23: mol_type = other DNA
actgcacctctgcacgctcagag

SEQ ID NO: 4672 - DNA, 23 bp, Homo sapiens
  source 1..23: mol_type = other DNA
ccagcacctctgcatgcttacgg

SEQ ID NO: 4673 - DNA, 22 bp, Homo sapiens
  source 1..22: mol_type = other DNA
aactcattctgcatactcagtg

SEQ ID NO: 4674 - DNA, 22 bp, Homo sapiens
  source 1..22: mol_type = other DNA
tgcacactctgcatgctcaggc

SEQ ID NO: 4675 - DNA, 23 bp, Homo sapiens
  source 1..23: mol_type = other DNA
tattcaccactgtatactcatga

SEQ ID NO: 4676 - DNA, 23 bp, Homo sapiens
  source 1..23: mol_type = other DNA
tttccacctctgcattctcatgg

SEQ ID NO: 4677 - DNA, 22 bp, Homo sapiens
  source 1..22: mol_type = other DNA
aacccacctctgttgctcatgg

SEQ ID NO: 4678 - DNA, 23 bp, Homo sapiens
  source 1..23: mol_type = other DNA
cactcacacttgcatgctccagg

SEQ ID NO: 4679 - DNA, 23 bp, Homo sapiens
  source 1..23: mol_type = other DNA
tgtacacatatgcatgctcaagg

SEQ ID NO: 4680 - DNA, 23 bp, Homo sapiens
  source 1..23: mol_type = other DNA
tcttcacctctgcatgccacagg

SEQ ID NO: 4681 - DNA, 22 bp, Homo sapiens
  source 1..22: mol_type = other DNA
tccactctcagcatgctcaggg

SEQ ID NO: 4682 - DNA, 22 bp, Homo sapiens
  source 1..22: mol_type = other DNA
cactcgactctgctgctcatgg

SEQ ID NO: 4683 - DNA, 21 bp, Homo sapiens
  source 1..21: mol_type = other DNA
tttttacctccatgctcaagg

SEQ ID NO: 4684 - DNA, 22 bp, Homo sapiens
  source 1..22: mol_type = other DNA
tactcacctctgctgctaagga

SEQ ID NO: 4685 - DNA, 23 bp, Homo sapiens
  source 1..23: mol_type = other DNA
tgtatgcctctgcatgctcatag

SEQ ID NO: 4686 - DNA, 22 bp, Homo sapiens
  source 1..22: mol_type = other DNA
tacttaccctgcatgatcatga

SEQ ID NO: 4687 - DNA, 23 bp, Homo sapiens
  source 1..23: mol_type = other DNA
ctgccacctctgcatgcacacag

SEQ ID NO: 4688 - DNA, 22 bp, Homo sapiens
  source 1..22: mol_type = other DNA
aagtcaccatgcatgctcaggg

SEQ ID NO: 4689 - DNA, 22 bp, Homo sapiens
  source 1..22: mol_type = other DNA
gactcacccctgcatctctggt

SEQ ID NO: 4690 - DNA, 22 bp, Homo sapiens
  source 1..22: mol_type = other DNA
tgctcatctctgctgctcacag

SEQ ID NO: 4691 - DNA, 23 bp, Homo sapiens
  source 1..23: mol_type = other DNA
ctctcacctctggatgcatacgg

SEQ ID NO: 4692 - DNA, 22 bp, Homo sapiens
  source 1..22: mol_type = other DNA
tactcatcctacatcctcagag

SEQ ID NO: 4693 - DNA, 22 bp, Homo sapiens
  source 1..22: mol_type = other DNA
tgcacacctctgctgcacaggg

SEQ ID NO: 4694 - DNA, 22 bp, Homo sapiens
  source 1..22: mol_type = other DNA
tactcacctaacatcctcaaga

SEQ ID NO: 4695 - DNA, 22 bp, Homo sapiens
  source 1..22: mol_type = other DNA
tactccctctgcagcttcaggg

SEQ ID NO: 4696 - DNA, 22 bp, Homo sapiens
  source 1..22: mol_type = other DNA
ttcccacctcccatgctctggg

SEQ ID NO: 4697 - DNA, 23 bp, Homo sapiens
  source 1..23: mol_type = other DNA
ttatcaccactccatgctcttgg

SEQ ID NO: 4698 - DNA, 22 bp, Homo sapiens
  source 1..22: mol_type = other DNA
tactccagcagcatgctctggg

SEQ ID NO: 4699 - DNA, 22 bp, Homo sapiens
  source 1..22: mol_type = other DNA
aaatccatctgcatgctcagtg

SEQ ID NO: 4700 - DNA, 23 bp, Homo sapiens
  source 1..23: mol_type = other DNA
tactcagtcctgcatgccctggg

SEQ ID NO: 4701 - DNA, 21 bp, Homo sapiens
  source 1..21: mol_type = other DNA
ttctcaactgcatactcaagg

SEQ ID NO: 4702 - DNA, 23 bp, Homo sapiens
  source 1..23: mol_type = other DNA
aggtcacctctgcattctcttgg

SEQ ID NO: 4703 - DNA, 23 bp, Homo sapiens
  source 1..23: mol_type = other DNA
ttatctactctgcaaactcaagg

SEQ ID NO: 4704 - DNA, 24 bp, Homo sapiens
  source 1..24: mol_type = other DNA
aactcacctcaacatgtcccaagg

SEQ ID NO: 4705 - DNA, 22 bp, Homo sapiens
  source 1..22: mol_type = other DNA
tgctcaccactgcatctcatgc

SEQ ID NO: 4706 - DNA, 23 bp, Homo sapiens
  source 1..23: mol_type = other DNA
accttacctctgcatcatcaaag

SEQ ID NO: 4707 - DNA, 22 bp, Homo sapiens
  source 1..22: mol_type = other DNA
gactcactaagcatgatcaagg

SEQ ID NO: 4708 - DNA, 23 bp, Homo sapiens
  source 1..23: mol_type = other DNA
tgagcccctctacatgctcaaag

SEQ ID NO: 4709 - DNA, 21 bp, Homo sapiens
  source 1..21: mol_type = other DNA
tagtcccctgcatgctcttgg

SEQ ID NO: 4710 - DNA, 21 bp, Homo sapiens
  source 1..21: mol_type = other DNA
tagaactctgcatgctccagg

SEQ ID NO: 4711 - DNA, 22 bp, Homo sapiens
  source 1..22: mol_type = other DNA
cactctctctgcatgctatagg

SEQ ID NO: 4712 - DNA, 22 bp, Homo sapiens
  source 1..22: mol_type = other DNA
tatggagctctgcatctcatgg

SEQ ID NO: 4713 - DNA, 22 bp, Homo sapiens
  source 1..22: mol_type = other DNA
tgctgactctgcatgctcgtga

SEQ ID NO: 4714 - DNA, 22 bp, Homo sapiens
  source 1..22: mol_type = other DNA
ctctcagctctgatgctcaggg

SEQ ID NO: 4715 - DNA, 22 bp, Homo sapiens
  source 1..22: mol_type = other DNA
gaagcacattgcatgctcaggg

SEQ ID NO: 4716 - DNA, 23 bp, Homo sapiens
  source 1..23: mol_type = other DNA
gacaaacctccacatgcccaagg

SEQ ID NO: 4717 - DNA, 22 bp, Homo sapiens
  source 1..22: mol_type = other DNA
aaatagccttgcatgctcaggg

SEQ ID NO: 4718 - DNA, 22 bp, Homo sapiens
  source 1..22: mol_type = other DNA
cactccctctggatgctctagg

SEQ ID NO: 4719 - DNA, 22 bp, Homo sapiens
  source 1..22: mol_type = other DNA
ctctcatccctgcagctcacgg

SEQ ID NO: 4720 - DNA, 22 bp, Homo sapiens
  source 1..22: mol_type = other DNA
ttctcacctctgcaggtcagag

SEQ ID NO: 4721 - DNA, 22 bp, Homo sapiens
  source 1..22: mol_type = other DNA
tgcacactcagcatgctcagtg

SEQ ID NO: 4722 - DNA, 22 bp, Homo sapiens
  source 1..22: mol_type = other DNA
tacccaatctgcatgcacttgg

SEQ ID NO: 4723 - DNA, 22 bp, Homo sapiens
  source 1..22: mol_type = other DNA
tatgacctttgtatgctcagtg

SEQ ID NO: 4724 - DNA, 23 bp, Homo sapiens
  source 1..23: mol_type = other DNA
tacacacatatgcatgctcagtt

SEQ ID NO: 4725 - DNA, 22 bp, Homo sapiens
  source 1..22: mol_type = other DNA
tagtacatctgcatgttctggg

SEQ ID NO: 4726 - DNA, 21 bp, Homo sapiens
  source 1..21: mol_type = other DNA
tactacactgcttgctcaagg

SEQ ID NO: 4727 - DNA, 22 bp, Homo sapiens
  source 1..22: mol_type = other DNA
tacaacctctgtatacccaggg

SEQ ID NO: 4728 - DNA, 22 bp, Homo sapiens
  source 1..22: mol_type = other DNA
aactcccctctgatgccctggg

SEQ ID NO: 4729 - DNA, 22 bp, Homo sapiens
  source 1..22: mol_type = other DNA
gcctcacctctggtgctcaggc

SEQ ID NO: 4730 - DNA, 23 bp, Homo sapiens
  source 1..23: mol_type = other DNA
tactaacctaaacatactcttgg

SEQ ID NO: 4731 - DNA, 23 bp, Homo sapiens
  source 1..23: mol_type = other DNA
tgaccaccactccaagctcaggg

SEQ ID NO: 4732 - DNA, 22 bp, Homo sapiens
  source 1..22: mol_type = other DNA
ttttcacctctacagctctggg

SEQ ID NO: 4733 - DNA, 21 bp, Homo sapiens
  source 1..21: mol_type = other DNA
taatcccctccttgctcaggg

SEQ ID NO: 4734 - DNA, 23 bp, Homo sapiens
  source 1..23: mol_type = other DNA
aacacacatatgcacgcacaagg

SEQ ID NO: 4735 - DNA, 23 bp, Homo sapiens
  source 1..23: mol_type = other DNA
tattcacccctgcatcaccagga

SEQ ID NO: 4736 - DNA, 23 bp, Homo sapiens
  source 1..23: mol_type = other DNA
tactcagacctgccagctctcgg

SEQ ID NO: 4737 - DNA, 22 bp, Homo sapiens
  source 1..22: mol_type = other DNA
tactccctctgcatgttcctta

SEQ ID NO: 4738 - DNA, 22 bp, Homo sapiens
  source 1..22: mol_type = other DNA
tactcaactctgctgttccagg

SEQ ID NO: 4739 - DNA, 21 bp, Homo sapiens
  source 1..21: mol_type = other DNA
tacttctttgcatgctcatga

SEQ ID NO: 4740 - DNA, 22 bp, Homo sapiens
  source 1..22: mol_type = other DNA
cattcacctctgcagctcaatg

SEQ ID NO: 4741 - DNA, 23 bp, Homo sapiens
  source 1..23: mol_type = other DNA
agctcagcgctacttgctcaggg

SEQ ID NO: 4742 - DNA, 23 bp, Homo sapiens
  source 1..23: mol_type = other DNA
aactcacctgtgcatgcgcatac

SEQ ID NO: 4743 - DNA, 23 bp, Homo sapiens
  source 1..23: mol_type = other DNA
tactcaactgcacatgctcatct

SEQ ID NO: 4744 - DNA, 22 bp, Homo sapiens
  source 1..22: mol_type = other DNA
tactcaacctgtatgttcacag

SEQ ID NO: 4745 - DNA, 23 bp, Homo sapiens
  source 1..23: mol_type = other DNA
aagtcacttcttcaagctcagga

SEQ ID NO: 4746 - DNA, 23 bp, Homo sapiens
  source 1..23: mol_type = other DNA
aagagacatctgcatgctcatgt

SEQ ID NO: 4747 - DNA, 23 bp, Homo sapiens
  source 1..23: mol_type = other DNA
catgcaactctccatgctcagga

SEQ ID NO: 4748 - DNA, 23 bp, Homo sapiens
  source 1..23: mol_type = other DNA
ttaccacctatgtttgctcaagg

SEQ ID NO: 4749 - DNA, 22 bp, Homo sapiens
  source 1..22: mol_type = other DNA
cactcaccgctgcagtccatgg

SEQ ID NO: 4750 - DNA, 22 bp, Homo sapiens
  source 1..22: mol_type = other DNA
tcctacctctgcatgcctgtgg

SEQ ID NO: 4751 - DNA, 22 bp, Homo sapiens
  source 1..22: mol_type = other DNA
ttatacctctgcattctcatag

SEQ ID NO: 4752 - DNA, 23 bp, Homo sapiens
  source 1..23: mol_type = other DNA
tatttggctctccaagctcaagg

SEQ ID NO: 4753 - DNA, 24 bp, Homo sapiens
  source 1..24: mol_type = other DNA
cactcacctttacatgggtcaagg

SEQ ID NO: 4754 - DNA, 22 bp, Homo sapiens
  source 1..22: mol_type = other DNA
cactcacatctgatgctcaatg

SEQ ID NO: 4755 - DNA, 23 bp, Homo sapiens
  source 1..23: mol_type = other DNA
cactcacccatgcaagctcctag

SEQ ID NO: 4756 - DNA, 23 bp, Homo sapiens
  source 1..23: mol_type = other DNA
tacatacgtatgcatgttcatgt

SEQ ID NO: 4757 - DNA, 23 bp, Homo sapiens
  source 1..23: mol_type = other DNA
tactcatctttgtatgctcaggc

SEQ ID NO: 4758 - DNA, 21 bp, Homo sapiens
  source 1..21: mol_type = other DNA
tactcacctctccagccacgg

SEQ ID NO: 4759 - DNA, 22 bp, Homo sapiens
  source 1..22: mol_type = other DNA
tactcagctctgctgctgtggt

SEQ ID NO: 4760 - DNA, 22 bp, Homo sapiens
  source 1..22: mol_type = other DNA
tactgacctttccatctcactg

SEQ ID NO: 4761 - DNA, 22 bp, Homo sapiens
  source 1..22: mol_type = other DNA
tactcactcagcatgttcagag

SEQ ID NO: 4762 - DNA, 22 bp, Homo sapiens
  source 1..22: mol_type = other DNA
tactcaccctgcctgctcagag

SEQ ID NO: 4763 - DNA, 23 bp, Homo sapiens
  source 1..23: mol_type = other DNA
tactcacctctgcatgtatatga

SEQ ID NO: 4764 - DNA, 23 bp, Homo sapiens
  source 1..23: mol_type = other DNA
tactcccctctgcatctcaaagg

SEQ ID NO: 4765 - DNA, 22 bp, Homo sapiens
  source 1..22: mol_type = other DNA
tactctccctacatgcacatgg

SEQ ID NO: 4766 - DNA, 21 bp, Homo sapiens
  source 1..21: mol_type = other DNA
tcctcaccagcatgctcaagg

SEQ ID NO: 4767 - DNA, 23 bp, Homo sapiens
  source 1..23: mol_type = other DNA
tgctcacctctgcagcccatggg

SEQ ID NO: 4768 - DNA, 23 bp, Homo sapiens
  source 1..23: mol_type = other DNA
tcctcaccactgcatgttcagag

SEQ ID NO: 4769 - DNA, 22 bp, Homo sapiens
  source 1..22: mol_type = other DNA
cactcacctcagcatctcagga

SEQ ID NO: 4770 - DNA, 22 bp, Homo sapiens
  source 1..22: mol_type = other DNA
tgctacctctacatgctaatgg

SEQ ID NO: 4771 - DNA, 23 bp, Homo sapiens
  source 1..23: mol_type = other DNA
tattcatctatgcatgctctggg

SEQ ID NO: 4772 - DNA, 23 bp, Homo sapiens
  source 1..23: mol_type = other DNA
tgttcctatctgcatgctccagg

SEQ ID NO: 4773 - DNA, 22 bp, Homo sapiens
  source 1..22: mol_type = other DNA
tctccacctcccatgctcaagg

SEQ ID NO: 4774 - DNA, 23 bp, Homo sapiens
  source 1..23: mol_type = other DNA
taaccaccactgcatgcacctgg

SEQ ID NO: 4775 - DNA, 23 bp, Homo sapiens
  source 1..23: mol_type = other DNA
tactcagtcctacatgctcaatg

SEQ ID NO: 4776 - DNA, 22 bp, Homo sapiens
  source 1..22: mol_type = other DNA
tactcacactgcaagctctcag

SEQ ID NO: 4777 - DNA, 22 bp, Homo sapiens
  source 1..22: mol_type = other DNA
ctgtcacctagcatgctcaggg

SEQ ID NO: 4778 - DNA, 22 bp, Homo sapiens
  source 1..22: mol_type = other DNA
ccctcaccctgcatgctccctg

SEQ ID NO: 4779 - DNA, 22 bp, Homo sapiens
  source 1..22: mol_type = other DNA
gccttaccctgcatgcttaggg

SEQ ID NO: 4780 - DNA, 23 bp, Homo sapiens
  source 1..23: mol_type = other DNA
tcctaacctctgcatgcccatgg

SEQ ID NO: 4781 - DNA, 23 bp, Homo sapiens
  source 1..23: mol_type = other DNA
ggctgtcttatgcatgctcatgg

SEQ ID NO: 4782 - DNA, 22 bp, Homo sapiens
  source 1..22: mol_type = other DNA
tgagcaccttgcatgctcttgg

SEQ ID NO: 4783 - DNA, 22 bp, Homo sapiens
  source 1..22: mol_type = other DNA
tgctcacgctgcatgctcttgg

SEQ ID NO: 4784 - DNA, 21 bp, Homo sapiens
  source 1..21: mol_type = other DNA
taccaatatgcatgctcaggg

SEQ ID NO: 4785 - DNA, 23 bp, Homo sapiens
  source 1..23: mol_type = other DNA
tgcttacctctatatgctcagag

SEQ ID NO: 4786 - DNA, 22 bp, Homo sapiens
  source 1..22: mol_type = other DNA
ttctcatcctgcatactcatgg

SEQ ID NO: 4787 - DNA, 23 bp, Homo sapiens
  source 1..23: mol_type = other DNA
tatccatctctgcatgctcaagg

SEQ ID NO: 4788 - DNA, 23 bp, Homo sapiens
  source 1..23: mol_type = other DNA
gcctaacatatgcatgctcacag

SEQ ID NO: 4789 - DNA, 23 bp, Homo sapiens
  source 1..23: mol_type = other DNA
ctcttacctctgcatcctcacag

SEQ ID NO: 4790 - DNA, 23 bp, Homo sapiens
  source 1..23: mol_type = other DNA
tgtatacctcttcttgctcatgg

SEQ ID NO: 4791 - DNA, 24 bp, Homo sapiens
  source 1..24: mol_type = other DNA
aactctacctctggatgcacaggg

SEQ ID NO: 4792 - DNA, 22 bp, Homo sapiens
  source 1..22: mol_type = other DNA
gtatcacctctgatgctcaagc

SEQ ID NO: 4793 - DNA, 23 bp, Homo sapiens
  source 1..23: mol_type = other DNA
tacatgcctctgcatgcacacag

SEQ ID NO: 4794 - DNA, 23 bp, Homo sapiens
  source 1..23: mol_type = other DNA
tgttcacagctgcatgctcatgg

SEQ ID NO: 4795 - DNA, 23 bp, Homo sapiens
  source 1..23: mol_type = other DNA
ctcctaccttggcatgctcatgg

SEQ ID NO: 4796 - DNA, 22 bp, Homo sapiens
  source 1..22: mol_type = other DNA
cactcaccttgtatgttcttgg

SEQ ID NO: 4797 - DNA, 23 bp, Homo sapiens
  source 1..23: mol_type = other DNA
gttccacctcagcatgctcacag

SEQ ID NO: 4798 - DNA, 22 bp, Homo sapiens
  source 1..22: mol_type = other DNA
gacacacattgcatgctcatgg

SEQ ID NO: 4799 - DNA, 22 bp, Homo sapiens
  source 1..22: mol_type = other DNA
acctcactcagcatgctcagga

SEQ ID NO: 4800 - DNA, 23 bp, Homo sapiens
  source 1..23: mol_type = other DNA
aactcacctctgctcgctcctgg

SEQ ID NO: 4801 - DNA, 23 bp, Homo sapiens
  source 1..23: mol_type = other DNA
aacacacatatgcatgctcacaa

SEQ ID NO: 4802 - DNA, 23 bp, Homo sapiens
  source 1..23: mol_type = other DNA
cataaaattctgcatgctcaggg

SEQ ID NO: 4803 - DNA, 22 bp, Homo sapiens
  source 1..22: mol_type = other DNA
ttctatctaggcatgctcaggg

SEQ ID NO: 4804 - DNA, 23 bp, Homo sapiens
  source 1..23: mol_type = other DNA
ttttcacatctgcatctccatgg

SEQ ID NO: 4805 - DNA, 22 bp, Homo sapiens
  source 1..22: mol_type = other DNA
tactacctctgcattctcttgg

SEQ ID NO: 4806 - DNA, 23 bp, Homo sapiens
  source 1..23: mol_type = other DNA
ttctcaccactgcatctccagag

SEQ ID NO: 4807 - DNA, 23 bp, Homo sapiens
  source 1..23: mol_type = other DNA
tgagcacctctgcatctttaagg

SEQ ID NO: 4808 - DNA, 23 bp, Homo sapiens
  source 1..23: mol_type = other DNA
tactcatctctgtattcccaggg

SEQ ID NO: 4809 - DNA, 22 bp, Homo sapiens
  source 1..22: mol_type = other DNA
tactcattcagcaagctcttgg

SEQ ID NO: 4810 - DNA, 23 bp, Homo sapiens
  source 1..23: mol_type = other DNA
ctccagcctctgcatgctcagag

SEQ ID NO: 4811 - DNA, 23 bp, Homo sapiens
  source 1..23: mol_type = other DNA
ctttcaccgctgcatactcaggg

SEQ ID NO: 4812 - DNA, 24 bp, Homo sapiens
  source 1..24: mol_type = other DNA
cactctccctctgcatgccctggg

SEQ ID NO: 4813 - DNA, 23 bp, Homo sapiens
  source 1..23: mol_type = other DNA
taccaatgtctacatgctcttgg

SEQ ID NO: 4814 - DNA, 23 bp, Homo sapiens
  source 1..23: mol_type = other DNA
tacccttccttgcatgctcttgg

SEQ ID NO: 4815 - DNA, 22 bp, Homo sapiens
  source 1..22: mol_type = other DNA
tataccctcctcatgctcaggg

SEQ ID NO: 4816 - DNA, 23 bp, Homo sapiens
  source 1..23: mol_type = other DNA
gtctattctcagcatgctcaggg

SEQ ID NO: 4817 - DNA, 23 bp, Homo sapiens
  source 1..23: mol_type = other DNA
cagggacctctgcatgatcaggg

SEQ ID NO: 4818 - DNA, 22 bp, Homo sapiens
  source 1..22: mol_type = other DNA
tgctaactctgcatgcacacag

SEQ ID NO: 4819 - DNA, 23 bp, Homo sapiens
  source 1..23: mol_type = other DNA
cctgcatctctgcttgctcaggg

SEQ ID NO: 4820 - DNA, 23 bp, Homo sapiens
  source 1..23: mol_type = other DNA
ctgtcaccactccatgctccagg

SEQ ID NO: 4821 - DNA, 24 bp, Homo sapiens
  source 1..24: mol_type = other DNA
aactaaccccctccatgctcaggg

SEQ ID NO: 4822 - DNA, 22 bp, Homo sapiens
  source 1..22: mol_type = other DNA
gacacacatcccatgctcatgg

SEQ ID NO: 4823 - DNA, 21 bp, Homo sapiens
  source 1..21: mol_type = other DNA
aactcacatgcatgctcacag

SEQ ID NO: 4824 - DNA, 23 bp, Homo sapiens
  source 1..23: mol_type = other DNA
tctctacctctgcatggtcactg

SEQ ID NO: 4825 - DNA, 23 bp, Homo sapiens
  source 1..23: mol_type = other DNA
tacaaaccactgactgctcaagg

SEQ ID NO: 4826 - DNA, 23 bp, Homo sapiens
  source 1..23: mol_type = other DNA
tcttctcaactgcatgcacatgg

SEQ ID NO: 4827 - DNA, 23 bp, Homo sapiens
  source 1..23: mol_type = other DNA
aacacaccactgcatgcacacaa

SEQ ID NO: 4828 - DNA, 23 bp, Homo sapiens
  source 1..23: mol_type = other DNA
tgcacgcctgtgcatgcacacag

SEQ ID NO: 4829 - DNA, 22 bp, Homo sapiens
  source 1..22: mol_type = other DNA
ttccacctccgcatgctcccag

SEQ ID NO: 4830 - DNA, 22 bp, Homo sapiens
  source 1..22: mol_type = other DNA
tactctctctgcatgccatggg

SEQ ID NO: 4831 - DNA, 22 bp, Homo sapiens
  source 1..22: mol_type = other DNA
taatcacattgcatactcaaga

SEQ ID NO: 4832 - DNA, 22 bp, Homo sapiens
  source 1..22: mol_type = other DNA
gccgcacctctgcatctcctgg

SEQ ID NO: 4833 - DNA, 23 bp, Homo sapiens
  source 1..23: mol_type = other DNA
gagccacctctgcatgatcctgg

SEQ ID NO: 4834 - DNA, 23 bp, Homo sapiens
  source 1..23: mol_type = other DNA
cacttacctctctaggctcattg

SEQ ID NO: 4835 - DNA, 23 bp, Homo sapiens
  source 1..23: mol_type = other DNA
gactcgcctctgctctctctggg

SEQ ID NO: 4836 - DNA, 23 bp, Homo sapiens
  source 1..23: mol_type = other DNA
tcctcatatctgcctgctccagc

SEQ ID NO: 4837 - DNA, 22 bp, Homo sapiens
  source 1..22: mol_type = other DNA
tgcttacatcagcatctcaagg

SEQ ID NO: 4838 - DNA, 23 bp, Homo sapiens
  source 1..23: mol_type = other DNA
taagaactactgcatgttcaagg

SEQ ID NO: 4839 - DNA, 23 bp, Homo sapiens
  source 1..23: mol_type = other DNA
tgctgatcactgcatgttcatgg

SEQ ID NO: 4840 - DNA, 23 bp, Homo sapiens
  source 1..23: mol_type = other DNA
tccacacctcttcatgctaaaaa

SEQ ID NO: 4841 - DNA, 23 bp, Homo sapiens
  source 1..23: mol_type = other DNA
cacacacacatgcatgcacaagg

SEQ ID NO: 4842 - DNA, 22 bp, Homo sapiens
  source 1..22: mol_type = other DNA
aactcagctctgcacctcaggg

SEQ ID NO: 4843 - DNA, 23 bp, Homo sapiens
  source 1..23: mol_type = other DNA
cactcaccccaacacgctcaggg

SEQ ID NO: 4844 - DNA, 22 bp, Homo sapiens
  source 1..22: mol_type = other DNA
tactagatctgcatgttcacag

SEQ ID NO: 4845 - DNA, 22 bp, Homo sapiens
  source 1..22: mol_type = other DNA
aacccacctctactgatcatgg

SEQ ID NO: 4846 - DNA, 22 bp, Homo sapiens
  source 1..22: mol_type = other DNA
tactcctccctgatgctctcgg

SEQ ID NO: 4847 - DNA, 23 bp, Homo sapiens
  source 1..23: mol_type = other DNA
tcctcacctcttcatgccactgg

SEQ ID NO: 4848 - DNA, 23 bp, Homo sapiens
  source 1..23: mol_type = other DNA
aacacatctccacatgcacatgg

SEQ ID NO: 4849 - DNA, 23 bp, Homo sapiens
  source 1..23: mol_type = other DNA
ttttcccatatgcatgctcacag

SEQ ID NO: 4850 - DNA, 23 bp, Homo sapiens
  source 1..23: mol_type = other DNA
cacacacctgtgagtgctcaaag

SEQ ID NO: 4851 - DNA, 23 bp, Homo sapiens
  source 1..23: mol_type = other DNA
tactcacctcggcgtcccaaagt

SEQ ID NO: 4852 - DNA, 22 bp, Homo sapiens
  source 1..22: mol_type = other DNA
tatgacctctacattctcttgg

SEQ ID NO: 4853 - DNA, 22 bp, Homo sapiens
  source 1..22: mol_type = other DNA
tactccactctgctgttctagg

SEQ ID NO: 4854 - DNA, 22 bp, Homo sapiens
  source 1..22: mol_type = other DNA
gaattacctctgcctctcatgg

SEQ ID NO: 4855 - DNA, 23 bp, Homo sapiens
  source 1..23: mol_type = other DNA
tattcacccctgcatctgcagtg

SEQ ID NO: 4856 - DNA, 23 bp, Homo sapiens
  source 1..23: mol_type = other DNA
tattcacctctgtatcctcaaca

SEQ ID NO: 4857 - DNA, 23 bp, Homo sapiens
  source 1..23: mol_type = other DNA
tccccacctctgctgcctccagg

SEQ ID NO: 4858 - DNA, 23 bp, Homo sapiens
  source 1..23: mol_type = other DNA
tacccagcactccatcctcacag

SEQ ID NO: 4859 - DNA, 23 bp, Homo sapiens
  source 1..23: mol_type = other DNA
tattcccctctgaatccttaggc

SEQ ID NO: 4860 - DNA, 23 bp, Homo sapiens
  source 1..23: mol_type = other DNA
gactcacctctgcatccttcata

SEQ ID NO: 4861 - DNA, 23 bp, Homo sapiens
  source 1..23: mol_type = other DNA
tacttacctctgcatgctcaggg

SEQ ID NO: 4862 - DNA, 22 bp, Homo sapiens
  source 1..22: mol_type = other DNA
tacacacccagcatgcccaagg

SEQ ID NO: 4863 - DNA, 22 bp, Homo sapiens
  source 1..22: mol_type = other DNA
tatctacctctgcatcttatgg

SEQ ID NO: 4864 - DNA, 22 bp, Homo sapiens
  source 1..22: mol_type = other DNA
ccctcaccctgcatgatcacgg

SEQ ID NO: 4865 - DNA, 23 bp, Homo sapiens
  source 1..23: mol_type = other DNA
gtgctacctctgcatgctcaagc

SEQ ID NO: 4866 - DNA, 22 bp, Homo sapiens
  source 1..22: mol_type = other DNA
cactcacctctgcatctctggt

SEQ ID NO: 4867 - DNA, 22 bp, Homo sapiens
  source 1..22: mol_type = other DNA
tcatcacctctgctgctcgggg

SEQ ID NO: 4868 - DNA, 23 bp, Homo sapiens
  source 1..23: mol_type = other DNA
cactcacttctgcatggtcatgg

SEQ ID NO: 4869 - DNA, 22 bp, Homo sapiens
  source 1..22: mol_type = other DNA
tactcactctgcatgtactcag

SEQ ID NO: 4870 - DNA, 22 bp, Homo sapiens
  source 1..22: mol_type = other DNA
tcattacccagcatgctcaggg

SEQ ID NO: 4871 - DNA, 23 bp, Homo sapiens
  source 1..23: mol_type = other DNA
ctgccaccactgcatgcacaggg

SEQ ID NO: 4872 - DNA, 22 bp, Homo sapiens
  source 1..22: mol_type = other DNA
tactcacatcgtatgcccatgg

SEQ ID NO: 4873 - DNA, 22 bp, Homo sapiens
  source 1..22: mol_type = other DNA
tgctacctctgcatgtccaggc

SEQ ID NO: 4874 - DNA, 22 bp, Homo sapiens
  source 1..22: mol_type = other DNA
cacccactctacatgcccacgg

SEQ ID NO: 4875 - DNA, 22 bp, Homo sapiens
  source 1..22: mol_type = other DNA
cattcaccctgcatgctctcag

SEQ ID NO: 4876 - DNA, 22 bp, Homo sapiens
  source 1..22: mol_type = other DNA
ttcacacctctgcagcccatgg

SEQ ID NO: 4877 - DNA, 23 bp, Homo sapiens
  source 1..23: mol_type = other DNA
tctgtatctctgcatgctcaggc

SEQ ID NO: 4878 - DNA, 23 bp, Homo sapiens
  source 1..23: mol_type = other DNA
tcctcacctctccctgctcaggg

SEQ ID NO: 4879 - DNA, 22 bp, Homo sapiens
  source 1..22: mol_type = other DNA
gacaaactatgcatgctcaggg

SEQ ID NO: 4880 - DNA, 23 bp, Homo sapiens
  source 1..23: mol_type = other DNA
tacttatctctgcatctccagga

SEQ ID NO: 4881 - DNA, 22 bp, Homo sapiens
  source 1..22: mol_type = other DNA
ctctcaccttgcaagttcatgg

SEQ ID NO: 4882 - DNA, 23 bp, Homo sapiens
  source 1..23: mol_type = other DNA
atttcacttctgcatgctctggg

SEQ ID NO: 4883 - DNA, 23 bp, Homo sapiens
  source 1..23: mol_type = other DNA
cagttcccactgcatgcgcatgg

SEQ ID NO: 4884 - DNA, 22 bp, Homo sapiens
  source 1..22: mol_type = other DNA
tgatcatatctcatgctcatgg

SEQ ID NO: 4885 - DNA, 22 bp, Homo sapiens
  source 1..22: mol_type = other DNA
tactacatctccatgcacaggg

SEQ ID NO: 4886 - DNA, 22 bp, Homo sapiens
  source 1..22: mol_type = other DNA
cacatacctctgcatcctaggg

SEQ ID NO: 4887 - DNA, 22 bp, Homo sapiens
  source 1..22: mol_type = other DNA
ttgccaccttgcatgctcatgg

SEQ ID NO: 4888 - DNA, 23 bp, Homo sapiens
  source 1..23: mol_type = other DNA
ttagcacctctgtatgctcagga

SEQ ID NO: 4889 - DNA, 23 bp, Homo sapiens
  source 1..23: mol_type = other DNA
tattcacgtctgcatgctcactg

SEQ ID NO: 4890 - DNA, 22 bp, Homo sapiens
  source 1..22: mol_type = other DNA
ttgtatctctgcttgctcaggg

SEQ ID NO: 4891 - DNA, 22 bp, Homo sapiens
  source 1..22: mol_type = other DNA
gactatctctgcatgttcagag

SEQ ID NO: 4892 - DNA, 22 bp, Homo sapiens
  source 1..22: mol_type = other DNA
gtttcacctctgcttctcatgg

SEQ ID NO: 4893 - DNA, 23 bp, Homo sapiens
  source 1..23: mol_type = other DNA
tactcacatctgcatcctttgga

SEQ ID NO: 4894 - DNA, 24 bp, Homo sapiens
  source 1..24: mol_type = other DNA
cactcactccctgcatgctcctgg

SEQ ID NO: 4895 - DNA, 23 bp, Homo sapiens
  source 1..23: mol_type = other DNA
tgcctccatctgcatgttcatgg

SEQ ID NO: 4896 - DNA, 23 bp, Homo sapiens
  source 1..23: mol_type = other DNA
tactcagctatgaatgctcaggg

SEQ ID NO: 4897 - DNA, 22 bp, Homo sapiens
  source 1..22: mol_type = other DNA
cactcacctctgcttctaaagg

SEQ ID NO: 4898 - DNA, 23 bp, Homo sapiens
  source 1..23: mol_type = other DNA
cacgcactcatgcatgcccatgg

SEQ ID NO: 4899 - DNA, 23 bp, Homo sapiens
  source 1..23: mol_type = other DNA
ccatcacctctgcatgcacagca

SEQ ID NO: 4900 - DNA, 24 bp, Homo sapiens
  source 1..24: mol_type = other DNA
tactcatccactgcatgtactggg

SEQ ID NO: 4901 - DNA, 22 bp, Homo sapiens
  source 1..22: mol_type = other DNA
taaaaaccttccatgctcatgg

SEQ ID NO: 4902 - DNA, 22 bp, Homo sapiens
  source 1..22: mol_type = other DNA
cagtcacccagcatgctctagg

SEQ ID NO: 4903 - DNA, 23 bp, Homo sapiens
  source 1..23: mol_type = other DNA
aaagtgactctgcatgctcaagg

SEQ ID NO: 4904 - DNA, 23 bp, Homo sapiens
  source 1..23: mol_type = other DNA
ttatcatctctgcatgctctgtg

SEQ ID NO: 4905 - DNA, 23 bp, Homo sapiens
  source 1..23: mol_type = other DNA
taatcaccactgcatccccaggg

SEQ ID NO: 4906 - DNA, 23 bp, Homo sapiens
  source 1..23: mol_type = other DNA
acattacctctgcatgctgatga

SEQ ID NO: 4907 - DNA, 24 bp, Homo sapiens
  source 1..24: mol_type = other DNA
tactctgcctctccatgctcaaag

SEQ ID NO: 4908 - DNA, 23 bp, Homo sapiens
  source 1..23: mol_type = other DNA
ttctcaccactgcatactcccag

SEQ ID NO: 4909 - DNA, 24 bp, Homo sapiens
  source 1..24: mol_type = other DNA
taatcacacactgcatgctctgga

SEQ ID NO: 4910 - DNA, 23 bp, Homo sapiens
  source 1..23: mol_type = other DNA
tacacacatatacatgctcacag

SEQ ID NO: 4911 - DNA, 23 bp, Homo sapiens
  source 1..23: mol_type = other DNA
ttcaaacctctgcatactctggt

SEQ ID NO: 4912 - DNA, 23 bp, Homo sapiens
  source 1..23: mol_type = other DNA
gaatgaaatctgcatgctcatga

SEQ ID NO: 4913 - DNA, 22 bp, Homo sapiens
  source 1..22: mol_type = other DNA
aaatcatctctgcatgccacgg

SEQ ID NO: 4914 - DNA, 23 bp, Homo sapiens
  source 1..23: mol_type = other DNA
tactcactactacatactcagta

SEQ ID NO: 4915 - DNA, 23 bp, Homo sapiens
  source 1..23: mol_type = other DNA
cacacacatctgccagctcacag

SEQ ID NO: 4916 - DNA, 23 bp, Homo sapiens
  source 1..23: mol_type = other DNA
tcctgcccactgcatgcgcctgg

SEQ ID NO: 4917 - DNA, 21 bp, Homo sapiens
  source 1..21: mol_type = other DNA
tacccacctccaagctcctgg

SEQ ID NO: 4918 - DNA, 23 bp, Homo sapiens
  source 1..23: mol_type = other DNA
tacccacttcagcgtgctcaagg

SEQ ID NO: 4919 - DNA, 22 bp, Homo sapiens
  source 1..22: mol_type = other DNA
aactaccactgcaagcccatgg

SEQ ID NO: 4920 - DNA, 22 bp, Homo sapiens
  source 1..22: mol_type = other DNA
tactcactgtgtatgctcaaag

SEQ ID NO: 4921 - DNA, 22 bp, Homo sapiens
  source 1..22: mol_type = other DNA
ccatcacctcttctgctcaagg

SEQ ID NO: 4922 - DNA, 23 bp, Homo sapiens
  source 1..23: mol_type = other DNA
tactcaaggcttcatgctgaggg

SEQ ID NO: 4923 - DNA, 23 bp, Homo sapiens
  source 1..23: mol_type = other DNA
ctttaacatctgcatgcacaagg

SEQ ID NO: 4924 - DNA, 23 bp, Homo sapiens
  source 1..23: mol_type = other DNA
tccccacctctgcatcccaaagt

SEQ ID NO: 4925 - DNA, 23 bp, Homo sapiens
  source 1..23: mol_type = other DNA
tatccagatctgcatgctccaga

SEQ ID NO: 4926 - DNA, 22 bp, Homo sapiens
  source 1..22: mol_type = other DNA
tactcaacctgcatgtaaaggg

SEQ ID NO: 4927 - DNA, 23 bp, Homo sapiens
  source 1..23: mol_type = other DNA
tcctttcctatccatgctctggg

SEQ ID NO: 4928 - DNA, 24 bp, Homo sapiens
  source 1..24: mol_type = other DNA
aactactcgtcttcatgctcatgg

SEQ ID NO: 4929 - DNA, 22 bp, Homo sapiens
  source 1..22: mol_type = other DNA
tactcactctgcaggctgaggc

SEQ ID NO: 4930 - DNA, 23 bp, Homo sapiens
  source 1..23: mol_type = other DNA
tattcaccactacatactaacag

SEQ ID NO: 4931 - DNA, 23 bp, Homo sapiens
  source 1..23: mol_type = other DNA
tactctcgtctgcataccccaga

SEQ ID NO: 4932 - DNA, 23 bp, Homo sapiens
  source 1..23: mol_type = other DNA
aagacacctgagcatgctgaagg

SEQ ID NO: 4933 - DNA, 23 bp, Homo sapiens
  source 1..23: mol_type = other DNA
tattcagctctaaatgctctggt

SEQ ID NO: 4934 - DNA, 23 bp, Homo sapiens
  source 1..23: mol_type = other DNA
tccataccactgcatgttccagg

SEQ ID NO: 4935 - DNA, 24 bp, Homo sapiens
  source 1..24: mol_type = other DNA
tactatatctctgcatccccaggg

SEQ ID NO: 4936 - DNA, 24 bp, Homo sapiens
  source 1..24: mol_type = other DNA
tactcacctcttgcaggcacaggg

SEQ ID NO: 4937 - DNA, 23 bp, Homo sapiens
  source 1..23: mol_type = other DNA
cacccacctcagcctcctaaagg

SEQ ID NO: 4938 - DNA, 23 bp, Homo sapiens
  source 1..23: mol_type = other DNA
tgctgccctatgcatgctgaggg

SEQ ID NO: 4939 - DNA, 23 bp, Homo sapiens
  source 1..23: mol_type = other DNA
tattcatctctgtatcatcagag

SEQ ID NO: 4940 - DNA, 23 bp, Homo sapiens
  source 1..23: mol_type = other DNA
cactcacctcagcctcctaaagt

SEQ ID NO: 4941 - DNA, 23 bp, Homo sapiens
  source 1..23: mol_type = other DNA
ctctcacctctgcatcttcacta

SEQ ID NO: 4942 - DNA, 23 bp, Homo sapiens
  source 1..23: mol_type = other DNA
cactcacccctgcataataagga

SEQ ID NO: 4943 - DNA, 23 bp, Homo sapiens
  source 1..23: mol_type = other DNA
tactccttgctccatgctcattg

SEQ ID NO: 4944 - DNA, 23 bp, Homo sapiens
  source 1..23: mol_type = other DNA
ttcccaactctctgtgctcatgg

SEQ ID NO: 4945 - DNA, 22 bp, Homo sapiens
  source 1..22: mol_type = other DNA
gaataacctctgatggtcaagg

SEQ ID NO: 4946 - DNA, 23 bp, Homo sapiens
  source 1..23: mol_type = other DNA
tattcacctctgcatgctctgag

SEQ ID NO: 4947 - DNA, 22 bp, Homo sapiens
  source 1..22: mol_type = other DNA
cactcatcctgcatgctcaaat

SEQ ID NO: 4948 - DNA, 23 bp, Homo sapiens
  source 1..23: mol_type = other DNA
tgctcacctctgcatcttaagga

SEQ ID NO: 4949 - DNA, 22 bp, Homo sapiens
  source 1..22: mol_type = other DNA
cacacaccctgcatactcaggg

SEQ ID NO: 4950 - DNA, 22 bp, Homo sapiens
  source 1..22: mol_type = other DNA
atctcacctctgctgttcaggg

SEQ ID NO: 4951 - DNA, 23 bp, Homo sapiens
  source 1..23: mol_type = other DNA
taagcaccactgcatgcaccagg

SEQ ID NO: 4952 - DNA, 23 bp, Homo sapiens
  source 1..23: mol_type = other DNA
acttcatctctgcatgctctgag

SEQ ID NO: 4953 - DNA, 23 bp, Homo sapiens
  source 1..23: mol_type = other DNA
atttcatatctgcatgctcttgg

SEQ ID NO: 4954 - DNA, 22 bp, Homo sapiens
  source 1..22: mol_type = other DNA
ctctcacctcagcatcccaagg

SEQ ID NO: 4955 - DNA, 23 bp, Homo sapiens
  source 1..23: mol_type = other DNA
gctttacctctgcatgttcctgg

SEQ ID NO: 4956 - DNA, 22 bp, Homo sapiens
  source 1..22: mol_type = other DNA
tactcacctcagctgctaaagg

SEQ ID NO: 4957 - DNA, 23 bp, Homo sapiens
  source 1..23: mol_type = other DNA
atctaacctctgcttgctcatgg

SEQ ID NO: 4958 - DNA, 22 bp, Homo sapiens
  source 1..22: mol_type = other DNA
tattaactctgcatactcagag

SEQ ID NO: 4959 - DNA, 23 bp, Homo sapiens
  source 1..23: mol_type = other DNA
tattcacctctgcatttctaagg

SEQ ID NO: 4960 - DNA, 22 bp, Homo sapiens
  source 1..22: mol_type = other DNA
cactcaccctacatcctctggg

SEQ ID NO: 4961 - DNA, 22 bp, Homo sapiens
  source 1..22: mol_type = other DNA
ttctatatcagcatgctcaggg

SEQ ID NO: 4962 - DNA, 22 bp, Homo sapiens
  source 1..22: mol_type = other DNA
tactccatctgcatattcatgg

SEQ ID NO: 4963 - DNA, 23 bp, Homo sapiens
  source 1..23: mol_type = other DNA
taggtcacactgcatgctcaggg

SEQ ID NO: 4964 - DNA, 22 bp, Homo sapiens
  source 1..22: mol_type = other DNA
ccttcacctctcttgctcatgg

SEQ ID NO: 4965 - DNA, 23 bp, Homo sapiens
  source 1..23: mol_type = other DNA
tgctcactctcacatgctcacgg

SEQ ID NO: 4966 - DNA, 23 bp, Homo sapiens
  source 1..23: mol_type = other DNA
tactcaactctgcattcatagca

SEQ ID NO: 4967 - DNA, 23 bp, Homo sapiens
  source 1..23: mol_type = other DNA
tacttagatctacatgctcaggg

SEQ ID NO: 4968 - DNA, 23 bp, Homo sapiens
  source 1..23: mol_type = other DNA
aacatacctcaccatgctcaagg

SEQ ID NO: 4969 - DNA, 23 bp, Homo sapiens
  source 1..23: mol_type = other DNA
tcctcacctctgcagccccaggg

SEQ ID NO: 4970 - DNA, 22 bp, Homo sapiens
  source 1..22: mol_type = other DNA
acctcacccagcaagctcaagg

SEQ ID NO: 4971 - DNA, 23 bp, Homo sapiens
  source 1..23: mol_type = other DNA
ctatttcctctgcatgcttaagg

SEQ ID NO: 4972 - DNA, 23 bp, Homo sapiens
  source 1..23: mol_type = other DNA
gatgcacctctccatgctctggg

SEQ ID NO: 4973 - DNA, 23 bp, Homo sapiens
  source 1..23: mol_type = other DNA
tactcctctctacatacacaggg

SEQ ID NO: 4974 - DNA, 23 bp, Homo sapiens
  source 1..23: mol_type = other DNA
cgcttaccaatgcatgcttaagg

SEQ ID NO: 4975 - DNA, 23 bp, Homo sapiens
  source 1..23: mol_type = other DNA
cactcacctctgcatgccaaaag

SEQ ID NO: 4976 - DNA, 23 bp, Homo sapiens
  source 1..23: mol_type = other DNA
tactcatctctgcatgctgcaca

SEQ ID NO: 4977 - DNA, 24 bp, Homo sapiens
  source 1..24: mol_type = other DNA
taagcaccctctgcatgctccctg

SEQ ID NO: 4978 - DNA, 23 bp, Homo sapiens
  source 1..23: mol_type = other DNA
ttcacaattctgcatgctctagg

SEQ ID NO: 4979 - DNA, 24 bp, Homo sapiens
  source 1..24: mol_type = other DNA
tagacaccatctgcatgctcagga

SEQ ID NO: 4980 - DNA, 23 bp, Homo sapiens
  source 1..23: mol_type = other DNA
tggtgaactatgcatgctcatgg

SEQ ID NO: 4981 - DNA, 23 bp, Homo sapiens
  source 1..23: mol_type = other DNA
cactcacctctgcctcccaaggt

SEQ ID NO: 4982 - DNA, 22 bp, Homo sapiens
  source 1..22: mol_type = other DNA
caccaccactgcatgcacacag

SEQ ID NO: 4983 - DNA, 23 bp, Homo sapiens
  source 1..23: mol_type = other DNA
tacaaagccatgcatgctcatgg

SEQ ID NO: 4984 - DNA, 22 bp, Homo sapiens
  source 1..22: mol_type = other DNA
gaatcacatctcatgctcatgg

SEQ ID NO: 4985 - DNA, 22 bp, Homo sapiens
  source 1..22: mol_type = other DNA
tcttcactctgcatgttcctgg

SEQ ID NO: 4986 - DNA, 23 bp, Homo sapiens
  source 1..23: mol_type = other DNA
tgctggtcactgcatgctcatga

SEQ ID NO: 4987 - DNA, 23 bp, Homo sapiens
  source 1..23: mol_type = other DNA
acctcacctctgcatgcttaagt

SEQ ID NO: 4988 - DNA, 22 bp, Homo sapiens
  source 1..22: mol_type = other DNA
gactacctcagcaagctcagag

SEQ ID NO: 4989 - DNA, 23 bp, Homo sapiens
  source 1..23: mol_type = other DNA
ttctaccctccccatgctctagg

SEQ ID NO: 4990 - DNA, 22 bp, Homo sapiens
  source 1..22: mol_type = other DNA
aacgtaccttccatgctcatgg

SEQ ID NO: 4991 - DNA, 22 bp, Homo sapiens
  source 1..22: mol_type = other DNA
tagtctactctcatgctccagg

SEQ ID NO: 4992 - DNA, 22 bp, Homo sapiens
  source 1..22: mol_type = other DNA
ttctcattatgcatgctcctgg

SEQ ID NO: 4993 - DNA, 23 bp, Homo sapiens
  source 1..23: mol_type = other DNA
tttctaccactgcatcctcatgg

SEQ ID NO: 4994 - DNA, 22 bp, Homo sapiens
  source 1..22: mol_type = other DNA
taatcccatctcatgctcacgg

SEQ ID NO: 4995 - DNA, 22 bp, Homo sapiens
  source 1..22: mol_type = other DNA
tactcattctccatgctctatg

SEQ ID NO: 4996 - DNA, 23 bp, Homo sapiens
  source 1..23: mol_type = other DNA
aatacacctctgccatctcaggg

SEQ ID NO: 4997 - DNA, 23 bp, Homo sapiens
  source 1..23: mol_type = other DNA
taccactctctgcatgcccatga

SEQ ID NO: 4998 - DNA, 22 bp, Homo sapiens
  source 1..22: mol_type = other DNA
gagacagctctcatgctcatgg

SEQ ID NO: 4999 - DNA, 22 bp, Homo sapiens
  source 1..22: mol_type = other DNA
tgatcaactctgatgatcatgg

SEQ ID NO: 5000 - DNA, 22 bp, Homo sapiens
  source 1..22: mol_type = other DNA
cattctctctccatgctcatgg

SEQ ID NO: 5001 - DNA, 23 bp, Homo sapiens
  source 1..23: mol_type = other DNA
aaccagcatttgcatgctcaggg

SEQ ID NO: 5002 - DNA, 23 bp, Homo sapiens
  source 1..23: mol_type = other DNA
gtcacatcacagcatgctcaagg

SEQ ID NO: 5003 - DNA, 22 bp, Homo sapiens
  source 1..22: mol_type = other DNA
gactacctgtacatgctcagtg

SEQ ID NO: 5004 - DNA, 24 bp, Homo sapiens
  source 1..24: mol_type = other DNA
aactgcaccactgcatgctctagc

SEQ ID NO: 5005 - DNA, 22 bp, Homo sapiens
  source 1..22: mol_type = other DNA
tgctcaagtagcatgctcaagg

SEQ ID NO: 5006 - DNA, 22 bp, Homo sapiens
  source 1..22: mol_type = other DNA
cactcagatctgcagctcaggg

SEQ ID NO: 5007 - DNA, 23 bp, Homo sapiens
  source 1..23: mol_type = other DNA
tccttcacactgaatgctcatgg

SEQ ID NO: 5008 - DNA, 23 bp, Homo sapiens
  source 1..23: mol_type = other DNA
cactcacctctgcctgtctagga

SEQ ID NO: 5009 - DNA, 23 bp, Homo sapiens
  source 1..23: mol_type = other DNA
cactcccctcagcatacacagtg

SEQ ID NO: 5010 - DNA, 24 bp, Homo sapiens
  source 1..24: mol_type = other DNA
ctctcacattctccatgctcaagg

SEQ ID NO: 5011 - DNA, 23 bp, Homo sapiens
  source 1..23: mol_type = other DNA
aagccaccactgcacgcccatgg

SEQ ID NO: 5012 - DNA, 22 bp, Homo sapiens
  source 1..22: mol_type = other DNA
tgctacctttgcatgttccagg

SEQ ID NO: 5013 - DNA, 23 bp, Homo sapiens
  source 1..23: mol_type = other DNA
cccccaccccttcatgctcagag

SEQ ID NO: 5014 - DNA, 23 bp, Homo sapiens
  source 1..23: mol_type = other DNA
ttcttagttctccatgctcatgg

SEQ ID NO: 5015 - DNA, 23 bp, Homo sapiens
  source 1..23: mol_type = other DNA
cactctattctgcatgcacaggg

SEQ ID NO: 5016 - DNA, 24 bp, Homo sapiens
  source 1..24: mol_type = other DNA
tcctcacccccagcatgcccaggg

SEQ ID NO: 5017 - DNA, 22 bp, Homo sapiens
  source 1..22: mol_type = other DNA
aattcacctctcttgctcacag

SEQ ID NO: 5018 - DNA, 21 bp, Homo sapiens
  source 1..21: mol_type = other DNA
tactcctcagcatgcacgtgg

SEQ ID NO: 5019 - DNA, 23 bp, Homo sapiens
  source 1..23: mol_type = other DNA
aactcatctctgtatcctcaggg

SEQ ID NO: 5020 - DNA, 22 bp, Homo sapiens
  source 1..22: mol_type = other DNA
aaaacacctctgtatgtcatgg

SEQ ID NO: 5021 - DNA, 24 bp, Homo sapiens
  source 1..24: mol_type = other DNA
ttttcacctctgcatttctgaggg

SEQ ID NO: 5022 - DNA, 22 bp, Homo sapiens
  source 1..22: mol_type = other DNA
tactcccactgcatgagaaagg

SEQ ID NO: 5023 - DNA, 22 bp, Homo sapiens
  source 1..22: mol_type = other DNA
tccccaccagtgcagctcaggg

SEQ ID NO: 5024 - DNA, 23 bp, Homo sapiens
  source 1..23: mol_type = other DNA
cactctcacctgcatgctgagga

SEQ ID NO: 5025 - DNA, 23 bp, Homo sapiens
  source 1..23: mol_type = other DNA
ttctcaccactgtatactgaagg

SEQ ID NO: 5026 - DNA, 22 bp, Homo sapiens
  source 1..22: mol_type = other DNA
gagtcatcactgatgctcaggg

SEQ ID NO: 5027 - DNA, 22 bp, Homo sapiens
  source 1..22: mol_type = other DNA
aaaccagctctgcatgccaggg

SEQ ID NO: 5028 - DNA, 21 bp, Homo sapiens
  source 1..21: mol_type = other DNA
ctctcacctctgctctcatgg

SEQ ID NO: 5029 - DNA, 23 bp, Homo sapiens
  source 1..23: mol_type = other DNA
aaggaacctctgcatcctcaggg

SEQ ID NO: 5030 - DNA, 23 bp, Homo sapiens
  source 1..23: mol_type = other DNA
cactcaagtctgcaggttcatag

SEQ ID NO: 5031 - DNA, 23 bp, Homo sapiens
  source 1..23: mol_type = other DNA
tccttacacctgcatgatcaagg

SEQ ID NO: 5032 - DNA, 22 bp, Homo sapiens
  source 1..22: mol_type = other DNA
ttatcacctttgcatctcaggt

SEQ ID NO: 5033 - DNA, 23 bp, Homo sapiens
  source 1..23: mol_type = other DNA
cactcacctctgcaaatccaggg

SEQ ID NO: 5034 - DNA, 23 bp, Homo sapiens
  source 1..23: mol_type = other DNA
tactcatctaatcctgcacaggg

SEQ ID NO: 5035 - DNA, 25 bp, Homo sapiens
  source 1..25: mol_type = other DNA
tactcacctcagcatcaggccaggt

SEQ ID NO: 5036 - DNA, 24 bp, Homo sapiens
  source 1..24: mol_type = other DNA
tactcagctctgcctgactccaag

SEQ ID NO: 5037 - DNA, 23 bp, Homo sapiens
  source 1..23: mol_type = other DNA
gaaacaccactgcattcccaggg

SEQ ID NO: 5038 - DNA, 23 bp, Homo sapiens
  source 1..23: mol_type = other DNA
gtatcacccctgcatgctcttgg

SEQ ID NO: 5039 - DNA, 22 bp, Homo sapiens
  source 1..22: mol_type = other DNA
tccacaccttgtatgctcaggg

SEQ ID NO: 5040 - DNA, 23 bp, Homo sapiens
  source 1..23: mol_type = other DNA
atcccacctctacatgctaaagg

SEQ ID NO: 5041 - DNA, 24 bp, Homo sapiens
  source 1..24: mol_type = other DNA
tcctatacctcagtatgctcatgg

SEQ ID NO: 5042 - DNA, 21 bp, Homo sapiens
  source 1..21: mol_type = other DNA
tgcttatctgcatgctcagag

SEQ ID NO: 5043 - DNA, 23 bp, Homo sapiens
  source 1..23: mol_type = other DNA
caatgtactctgcatgcttatgg

SEQ ID NO: 5044 - DNA, 22 bp, Homo sapiens
  source 1..22: mol_type = other DNA
tactcacctctgatgttccggg

SEQ ID NO: 5045 - DNA, 21 bp, Homo sapiens
  source 1..21: mol_type = other DNA
gactcatctgcatgctccttg

SEQ ID NO: 5046 - DNA, 23 bp, Homo sapiens
  source 1..23: mol_type = other DNA
gacatacatatgcatgcttatgg

SEQ ID NO: 5047 - DNA, 23 bp, Homo sapiens
  source 1..23: mol_type = other DNA
tactctctactgcatgtctaggg

SEQ ID NO: 5048 - DNA, 23 bp, Homo sapiens
  source 1..23: mol_type = other DNA
atcctacctctgcttgctctggg

SEQ ID NO: 5049 - DNA, 22 bp, Homo sapiens
  source 1..22: mol_type = other DNA
aacttccactgcatgctcatgc

SEQ ID NO: 5050 - DNA, 22 bp, Homo sapiens
  source 1..22: mol_type = other DNA
taatgcctctacatgctcactg

SEQ ID NO: 5051 - DNA, 22 bp, Homo sapiens
  source 1..22: mol_type = other DNA
tccccaccacacatgctcaggg

SEQ ID NO: 5052 - DNA, 23 bp, Homo sapiens
  source 1..23: mol_type = other DNA
tgctcacatctgtatgcacatgg

SEQ ID NO: 5053 - DNA, 21 bp, Homo sapiens
  source 1..21: mol_type = other DNA
tacacacatccatgctcaagg

SEQ ID NO: 5054 - DNA, 23 bp, Homo sapiens
  source 1..23: mol_type = other DNA
caatcacctctgcattctcagtg

SEQ ID NO: 5055 - DNA, 23 bp, Homo sapiens
  source 1..23: mol_type = other DNA
aagcctcatctgcatgctcaggg

SEQ ID NO: 5056 - DNA, 23 bp, Homo sapiens
  source 1..23: mol_type = other DNA
cactcaccctcacatgcccacgg

SEQ ID NO: 5057 - DNA, 22 bp, Homo sapiens
  source 1..22: mol_type = other DNA
tcttcaccactgcatcacatgg

SEQ ID NO: 5058 - DNA, 23 bp, Homo sapiens
  source 1..23: mol_type = other DNA
ttgactcatctgcttgctcatgg

SEQ ID NO: 5059 - DNA, 23 bp, Homo sapiens
  source 1..23: mol_type = other DNA
aacctaacactgcatactcatgg

SEQ ID NO: 5060 - DNA, 23 bp, Homo sapiens
  source 1..23: mol_type = other DNA
tactcacttccacatgctccata

SEQ ID NO: 5061 - DNA, 23 bp, Homo sapiens
  source 1..23: mol_type = other DNA
tttgaacctctccatgcttatgg

SEQ ID NO: 5062 - DNA, 22 bp, Homo sapiens
  source 1..22: mol_type = other DNA
cactaacctcacatgcacacgg

SEQ ID NO: 5063 - DNA, 21 bp, Homo sapiens
  source 1..21: mol_type = other DNA
tactcatctgcatgcacatgc

SEQ ID NO: 5064 - DNA, 22 bp, Homo sapiens
  source 1..22: mol_type = other DNA
taatcaccctgcatgttcacgc

SEQ ID NO: 5065 - DNA, 24 bp, Homo sapiens
  source 1..24: mol_type = other DNA
aaatcacctatgcattgctcatgg

SEQ ID NO: 5066 - DNA, 23 bp, Homo sapiens
  source 1..23: mol_type = other DNA
tgatcacatctgattgctcactg

SEQ ID NO: 5067 - DNA, 21 bp, Homo sapiens
  source 1..21: mol_type = other DNA
tcctcacctccatgcccacag

SEQ ID NO: 5068 - DNA, 22 bp, Homo sapiens
  source 1..22: mol_type = other DNA
taatcatccttgcatctcaggg

SEQ ID NO: 5069 - DNA, 23 bp, Homo sapiens
  source 1..23: mol_type = other DNA
caaactcccctgcatgctcagtg

SEQ ID NO: 5070 - DNA, 23 bp, Homo sapiens
  source 1..23: mol_type = other DNA
ttgcaagctctgcatgctcatgg

SEQ ID NO: 5071 - DNA, 23 bp, Homo sapiens
  source 1..23: mol_type = other DNA
tgaagacctccacatgctcaagg

SEQ ID NO: 5072 - DNA, 23 bp, Homo sapiens
  source 1..23: mol_type = other DNA
tatcctagtctgtatgctcaagg

SEQ ID NO: 5073 - DNA, 22 bp, Homo sapiens
  source 1..22: mol_type = other DNA
gaaacacatctcatgctcacgg

SEQ ID NO: 5074 - DNA, 23 bp, Homo sapiens
  source 1..23: mol_type = other DNA
cactcacctctgcacgctgaagg

SEQ ID NO: 5075 - DNA, 23 bp, Homo sapiens
  source 1..23: mol_type = other DNA
cattcaccactgtatacccaggg

SEQ ID NO: 5076 - DNA, 21 bp, Homo sapiens
  source 1..21: mol_type = other DNA
ctcccacctctgcattcatgg

SEQ ID NO: 5077 - DNA, 22 bp, Homo sapiens
  source 1..22: mol_type = other DNA
cactcattctgcatgtgcaggg

SEQ ID NO: 5078 - DNA, 22 bp, Homo sapiens
  source 1..22: mol_type = other DNA
tcctcacctcccaagctcaggg

SEQ ID NO: 5079 - DNA, 23 bp, Homo sapiens
  source 1..23: mol_type = other DNA
cattcacctttgcatctccaggg

SEQ ID NO: 5080 - DNA, 23 bp, Homo sapiens
  source 1..23: mol_type = other DNA
tgctcactgctacatgcccaagg

SEQ ID NO: 5081 - DNA, 22 bp, Homo sapiens
  source 1..22: mol_type = other DNA
tactgcactctgcagctctggg

SEQ ID NO: 5082 - DNA, 23 bp, Homo sapiens
  source 1..23: mol_type = other DNA
gacagaccaatgcttgctcaagg

SEQ ID NO: 5083 - DNA, 22 bp, Homo sapiens
  source 1..22: mol_type = other DNA
tattcatctctacatctctagg

SEQ ID NO: 5084 - DNA, 23 bp, Homo sapiens
  source 1..23: mol_type = other DNA
tcctaccctcaccaagctcatgg

SEQ ID NO: 5085 - DNA, 22 bp, Homo sapiens
  source 1..22: mol_type = other DNA
tgcacaccactgcatctctagg

SEQ ID NO: 5086 - DNA, 23 bp, Homo sapiens
  source 1..23: mol_type = other DNA
tattcacctctgtatccccaggg

SEQ ID NO: 5087 - DNA, 24 bp, Homo sapiens
  source 1..24: mol_type = other DNA
ttcttacctctagcatgctcttga

SEQ ID NO: 5088 - DNA, 22 bp, Homo sapiens
  source 1..22: mol_type = other DNA
tactcacctcttcatattagga

SEQ ID NO: 5089 - DNA, 23 bp, Homo sapiens
  source 1..23: mol_type = other DNA
tacttacatctgcatgatcagtg

SEQ ID NO: 5090 - DNA, 21 bp, Homo sapiens
  source 1..21: mol_type = other DNA
cattcatctggatgctcaagg

SEQ ID NO: 5091 - DNA, 23 bp, Homo sapiens
  source 1..23: mol_type = other DNA
taatcagctcagcatgcccaaat

SEQ ID NO: 5092 - DNA, 23 bp, Homo sapiens
  source 1..23: mol_type = other DNA
tactcacccctccatgcccacct

SEQ ID NO: 5093 - DNA, 23 bp, Homo sapiens
  source 1..23: mol_type = other DNA
gaggccccactgcctgctcatgg

SEQ ID NO: 5094 - DNA, 22 bp, Homo sapiens
  source 1..22: mol_type = other DNA
tacccacctctcatgctcattt

SEQ ID NO: 5095 - DNA, 23 bp, Homo sapiens
  source 1..23: mol_type = other DNA
cactcacttctacattcacatgg

SEQ ID NO: 5096 - DNA, 23 bp, Homo sapiens
  source 1..23: mol_type = other DNA
aaattaactcttcttgctcaggg

SEQ ID NO: 5097 - DNA, 22 bp, Homo sapiens
  source 1..22: mol_type = other DNA
tactccaagtgcatgctgaggg

SEQ ID NO: 5098 - DNA, 23 bp, Homo sapiens
  source 1..23: mol_type = other DNA
tactcacctttacatcccatagg

SEQ ID NO: 5099 - DNA, 23 bp, Homo sapiens
  source 1..23: mol_type = other DNA
gattaatctctgcatagtcatgg

SEQ ID NO: 5100 - DNA, 24 bp, Homo sapiens
  source 1..24: mol_type = other DNA
tactcacatcctgcatggacatgg

SEQ ID NO: 5101 - DNA, 23 bp, Homo sapiens
  source 1..23: mol_type = other DNA
tactcaactctgtatccctagag

SEQ ID NO: 5102 - DNA, 23 bp, Homo sapiens
  source 1..23: mol_type = other DNA
ttctgatctctacaagctcatgt

SEQ ID NO: 5103 - DNA, 23 bp, Homo sapiens
  source 1..23: mol_type = other DNA
tacttacctcagcatctactggg

SEQ ID NO: 5104 - DNA, 23 bp, Homo sapiens
  source 1..23: mol_type = other DNA
ttttctcatttgcatgcccatgg

SEQ ID NO: 5105 - DNA, 22 bp, Homo sapiens
  source 1..22: mol_type = other DNA
tactgacctctgaatctcgtgc

SEQ ID NO: 5106 - DNA, 22 bp, Homo sapiens
  source 1..22: mol_type = other DNA
tacccacctctgcagctggagg

SEQ ID NO: 5107 - DNA, 23 bp, Homo sapiens
  source 1..23: mol_type = other DNA
taacctcctctccatggttatgg

SEQ ID NO: 5108 - DNA, 24 bp, Homo sapiens
  source 1..24: mol_type = other DNA
tattcacatctgagttgctcaagg

SEQ ID NO: 5109 - DNA, 22 bp, Homo sapiens
  source 1..22: mol_type = other DNA
tactcagtctccatgagcaggg

SEQ ID NO: 5110 - DNA, 21 bp, Homo sapiens
  source 1..21: mol_type = other DNA
taaacacctccgcattcaagg

SEQ ID NO: 5111 - DNA, 23 bp, Homo sapiens
  source 1..23: mol_type = other DNA
ttctctatactgcattctcaagg

SEQ ID NO: 5112 - DNA, 23 bp, Homo sapiens
  source 1..23: mol_type = other DNA
gactcagctctggaggctctgag

SEQ ID NO: 5113 - DNA, 23 bp, Homo sapiens
  source 1..23: mol_type = other DNA
ggctcacctctgcatgtcgctgg

SEQ ID NO: 5114 - DNA, 23 bp, Homo sapiens
  source 1..23: mol_type = other DNA
tgccctcagctgcatgcccaagg

SEQ ID NO: 5115 - DNA, 25 bp, Homo sapiens
  source 1..25: mol_type = other DNA
tactcacctcaatcctggctctcgg

SEQ ID NO: 5116 - DNA, 22 bp, Homo sapiens
  source 1..22: mol_type = other DNA
tattcagcaatgcatgtcaagg

SEQ ID NO: 5117 - DNA, 22 bp, Homo sapiens
  source 1..22: mol_type = other DNA
tacttaccttacatgttcaagg

SEQ ID NO: 5118 - DNA, 22 bp, Homo sapiens
  source 1..22: mol_type = other DNA
atcccaccccgcatgctcaggg

SEQ ID NO: 5119 - DNA, 23 bp, Homo sapiens
  source 1..23: mol_type = other DNA
gtctctactctacatgctctggg

SEQ ID NO: 5120 - DNA, 22 bp, Homo sapiens
  source 1..22: mol_type = other DNA
cacccacccagcatgctcttgg

SEQ ID NO: 5121 - DNA, 22 bp, Homo sapiens
  source 1..22: mol_type = other DNA
tactcaccaagcatggacacgg

SEQ ID NO: 5122 - DNA, 22 bp, Homo sapiens
  source 1..22: mol_type = other DNA
gcatcacctctgcatctcaaga

SEQ ID NO: 5123 - DNA, 22 bp, Homo sapiens
  source 1..22: mol_type = other DNA
tactaacctcacatgctcacag

SEQ ID NO: 5124 - DNA, 22 bp, Homo sapiens
  source 1..22: mol_type = other DNA
acgtcacctctgcatctcagcg

SEQ ID NO: 5125 - DNA, 23 bp, Homo sapiens
  source 1..23: mol_type = other DNA
gactctaccttgcacgctcaggg

SEQ ID NO: 5126 - DNA, 23 bp, Homo sapiens
  source 1..23: mol_type = other DNA
tgcatacatctgcatgctcctcg

SEQ ID NO: 5127 - DNA, 23 bp, Homo sapiens
  source 1..23: mol_type = other DNA
tgtattcctctgcaagctcatgg

SEQ ID NO: 5128 - DNA, 23 bp, Homo sapiens
  source 1..23: mol_type = other DNA
ctctcacccctacatacccatgg

SEQ ID NO: 5129 - DNA, 22 bp, Homo sapiens
  source 1..22: mol_type = other DNA
acctcacctctgctgcgcaagg

SEQ ID NO: 5130 - DNA, 23 bp, Homo sapiens
  source 1..23: mol_type = other DNA
cactgactatagcatgctcatgg

SEQ ID NO: 5131 - DNA, 22 bp, Homo sapiens
  source 1..22: mol_type = other DNA
cagacacctctgctgctctagg

SEQ ID NO: 5132 - DNA, 23 bp, Homo sapiens
  source 1..23: mol_type = other DNA
tcatcacctctgcatccccagga

SEQ ID NO: 5133 - DNA, 22 bp, Homo sapiens
  source 1..22: mol_type = other DNA
tatagcctctgcatgtccaggg

SEQ ID NO: 5134 - DNA, 23 bp, Homo sapiens
  source 1..23: mol_type = other DNA
aacccacctctacatgctatggt

SEQ ID NO: 5135 - DNA, 24 bp, Homo sapiens
  source 1..24: mol_type = other DNA
tgcaaaccatctgcaagctcaggg

SEQ ID NO: 5136 - DNA, 21 bp, Homo sapiens
  source 1..21: mol_type = other DNA
tactactctaaatgctcaggg

SEQ ID NO: 5137 - DNA, 23 bp, Homo sapiens
  source 1..23: mol_type = other DNA
tcatcatatctgcatgcttatag

SEQ ID NO: 5138 - DNA, 23 bp, Homo sapiens
  source 1..23: mol_type = other DNA
tacaaacctctacatattcaagg

SEQ ID NO: 5139 - DNA, 23 bp, Homo sapiens
  source 1..23: mol_type = other DNA
aaaactcctctgcatactcatga

SEQ ID NO: 5140 - DNA, 23 bp, Homo sapiens
  source 1..23: mol_type = other DNA
atcctacccctgcctgctcaggg

SEQ ID NO: 5141 - DNA, 23 bp, Homo sapiens
  source 1..23: mol_type = other DNA
ttcccatttctgcatgctcagag

SEQ ID NO: 5142 - DNA, 23 bp, Homo sapiens
  source 1..23: mol_type = other DNA
cagaaacctcagcatgctctagg

SEQ ID NO: 5143 - DNA, 23 bp, Homo sapiens
  source 1..23: mol_type = other DNA
aacccacctctgcatactattgg

SEQ ID NO: 5144 - DNA, 24 bp, Homo sapiens
  source 1..24: mol_type = other DNA
taaacactcactgcatgctcaggc

SEQ ID NO: 5145 - DNA, 23 bp, Homo sapiens
  source 1..23: mol_type = other DNA
cgcacacctatgcaggctcaggg

SEQ ID NO: 5146 - DNA, 23 bp, Homo sapiens
  source 1..23: mol_type = other DNA
aacattcctctgcatgctgaggt

SEQ ID NO: 5147 - DNA, 23 bp, Homo sapiens
  source 1..23: mol_type = other DNA
ttcacttcactgcatgctcaggg

SEQ ID NO: 5148 - DNA, 23 bp, Homo sapiens
  source 1..23: mol_type = other DNA
tatttcccactgcatgctcattg

SEQ ID NO: 5149 - DNA, 23 bp, Homo sapiens
  source 1..23: mol_type = other DNA
tcattaccactgcaagcccaggg

SEQ ID NO: 5150 - DNA, 23 bp, Homo sapiens
  source 1..23: mol_type = other DNA
tactcacctgtgcacgcacgtcc

SEQ ID NO: 5151 - DNA, 23 bp, Homo sapiens
  source 1..23: mol_type = other DNA
cactcacctctccaggctcatcc

SEQ ID NO: 5152 - DNA, 23 bp, Homo sapiens
  source 1..23: mol_type = other DNA
tagttatttatgcatgctctggg

SEQ ID NO: 5153 - DNA, 22 bp, Homo sapiens
  source 1..22: mol_type = other DNA
taaacaaactgcatgctcatgg

SEQ ID NO: 5154 - DNA, 23 bp, Homo sapiens
  source 1..23: mol_type = other DNA
tacacacctatgcatgcacacac

SEQ ID NO: 5155 - DNA, 23 bp, Homo sapiens
  source 1..23: mol_type = other DNA
gattctaatctgcatgcttatgg

SEQ ID NO: 5156 - DNA, 22 bp, Homo sapiens
  source 1..22: mol_type = other DNA
tatgacctctgcttactcctgg

SEQ ID NO: 5157 - DNA, 23 bp, Homo sapiens
  source 1..23: mol_type = other DNA
gagtcacagctgcaagctaaggg

SEQ ID NO: 5158 - DNA, 23 bp, Homo sapiens
  source 1..23: mol_type = other DNA
tactcggcgctgaatactcaagc

SEQ ID NO: 5159 - DNA, 23 bp, Homo sapiens
  source 1..23: mol_type = other DNA
ttgacacatctgactgctcaggg

SEQ ID NO: 5160 - DNA, 22 bp, Homo sapiens
  source 1..22: mol_type = other DNA
acctcacctctgaatctctagg

SEQ ID NO: 5161 - DNA, 23 bp, Homo sapiens
  source 1..23: mol_type = other DNA
tactcaccactgattccccagag

SEQ ID NO: 5162 - DNA, 23 bp, Homo sapiens
  source 1..23: mol_type = other DNA
taaagaccactgcatgtccaagg

SEQ ID NO: 5163 - DNA, 23 bp, Homo sapiens
  source 1..23: mol_type = other DNA
tacccccatctgcatactcttgc

SEQ ID NO: 5164 - DNA, 21 bp, Homo sapiens
  source 1..21: mol_type = other DNA
caatcacctctgcgctcacgg

SEQ ID NO: 5165 - DNA, 23 bp, Homo sapiens
  source 1..23: mol_type = other DNA
tgttcaccccttcatgcccagga

SEQ ID NO: 5166 - DNA, 23 bp, Homo sapiens
  source 1..23: mol_type = other DNA
tacccacctcagcatcccaaagt

SEQ ID NO: 5167 - DNA, 23 bp, Homo sapiens
  source 1..23: mol_type = other DNA
ccttcacctctacattgtcatgg

SEQ ID NO: 5168 - DNA, 24 bp, Homo sapiens
  source 1..24: mol_type = other DNA
tactcatctccttcttgctcctgg

SEQ ID NO: 5169 - DNA, 21 bp, Homo sapiens
  source 1..21: mol_type = other DNA
taatatcctctgcactcaggg

SEQ ID NO: 5170 - DNA, 22 bp, Homo sapiens
  source 1..22: mol_type = other DNA
tccacatctctgctgctcaaag

SEQ ID NO: 5171 - DNA, 23 bp, Homo sapiens
  source 1..23: mol_type = other DNA
tactcatttcctcattcccatgg

SEQ ID NO: 5172 - DNA, 23 bp, Homo sapiens
  source 1..23: mol_type = other DNA
tactcatctctccctgagcagag

SEQ ID NO: 5173 - DNA, 23 bp, Homo sapiens
  source 1..23: mol_type = other DNA
tacacacatgtacatgtgcatgg

SEQ ID NO: 5174 - DNA, 22 bp, Homo sapiens
  source 1..22: mol_type = other DNA
tactcatttttcatgctcaggg

SEQ ID NO: 5175 - DNA, 22 bp, Homo sapiens
  source 1..22: mol_type = other DNA
tactcccctctactgtacaggg

SEQ ID NO: 5176 - DNA, 23 bp, Homo sapiens
  source 1..23: mol_type = other DNA
tactccaccatgcatgctcttgg

SEQ ID NO: 5177 - DNA, 23 bp, Homo sapiens
  source 1..23: mol_type = other DNA
ttataatatctgcatgctcttgg

SEQ ID NO: 5178 - DNA, 23 bp, Homo sapiens
  source 1..23: mol_type = other DNA
tactcagccctgcatgctcctgg

SEQ ID NO: 5179 - DNA, 22 bp, Homo sapiens
  source 1..22: mol_type = other DNA
tactcacctcgcatactcaatg

SEQ ID NO: 5180 - DNA, 22 bp, Homo sapiens
  source 1..22: mol_type = other DNA
tgtctacctctgatgctcatgg

SEQ ID NO: 5181 - DNA, 22 bp, Homo sapiens
  source 1..22: mol_type = other DNA
gactcaccctgcattctcgagg

SEQ ID NO: 5182 - DNA, 23 bp, Homo sapiens
  source 1..23: mol_type = other DNA
acaatacctctgcaagctcaggg

SEQ ID NO: 5183 - DNA, 23 bp, Homo sapiens
  source 1..23: mol_type = other DNA
ttctcacctctgcttgctgatgg

SEQ ID NO: 5184 - DNA, 23 bp, Homo sapiens
  source 1..23: mol_type = other DNA
gtctcacctctgcacgctaaagg

SEQ ID NO: 5185 - DNA, 22 bp, Homo sapiens
  source 1..22: mol_type = other DNA
ttctcacttctgcatcttatgg

SEQ ID NO: 5186 - DNA, 22 bp, Homo sapiens
  source 1..22: mol_type = other DNA
ttctacatctgcatgcttatgg

SEQ ID NO: 5187 - DNA, 23 bp, Homo sapiens
  source 1..23: mol_type = other DNA
aattgatatctacatgctcaagg

SEQ ID NO: 5188 - DNA, 24 bp, Homo sapiens
  source 1..24: mol_type = other DNA
ttcctacctctgcattgctcacgg

SEQ ID NO: 5189 - DNA, 22 bp, Homo sapiens
  source 1..22: mol_type = other DNA
cactccctctgcatgcccaggc

SEQ ID NO: 5190 - DNA, 23 bp, Homo sapiens
  source 1..23: mol_type = other DNA
agctcacctctgcatccccagag

SEQ ID NO: 5191 - DNA, 23 bp, Homo sapiens
  source 1..23: mol_type = other DNA
gtctcacctctgctgccccatgg

SEQ ID NO: 5192 - DNA, 22 bp, Homo sapiens
  source 1..22: mol_type = other DNA
ttagcacccctgcatgtcaagg

SEQ ID NO: 5193 - DNA, 22 bp, Homo sapiens
  source 1..22: mol_type = other DNA
tctttacctctcctgctcaggg

SEQ ID NO: 5194 - DNA, 21 bp, Homo sapiens
  source 1..21: mol_type = other DNA
tgctcacacgcatgctcaggg

SEQ ID NO: 5195 - DNA, 22 bp, Homo sapiens
  source 1..22: mol_type = other DNA
gaaacacctctcatgctcatag

SEQ ID NO: 5196 - DNA, 22 bp, Homo sapiens
  source 1..22: mol_type = other DNA
tgctcacatctaatgctcatgg

SEQ ID NO: 5197 - DNA, 22 bp, Homo sapiens
  source 1..22: mol_type = other DNA
acctcacctcagctgctctagg

SEQ ID NO: 5198 - DNA, 23 bp, Homo sapiens
  source 1..23: mol_type = other DNA
taattaaaacagcatgctcaggg

SEQ ID NO: 5199 - DNA, 23 bp, Homo sapiens
  source 1..23: mol_type = other DNA
tactcaccactgtattaacaagg

SEQ ID NO: 5200 - DNA, 24 bp, Homo sapiens
  source 1..24: mol_type = other DNA
tagtgaccatctacatggtcaggg

SEQ ID NO: 5201 - DNA, 22 bp, Homo sapiens
  source 1..22: mol_type = other DNA
tactcaccttacatgccagtgg

SEQ ID NO: 5202 - DNA, 22 bp, Homo sapiens
  source 1..22: mol_type = other DNA
gactcacctcccatcttcatgg

SEQ ID NO: 5203 - DNA, 22 bp, Homo sapiens
  source 1..22: mol_type = other DNA
caatccctctgcatgctcagga

SEQ ID NO: 5204 - DNA, 22 bp, Homo sapiens
  source 1..22: mol_type = other DNA
tagtatgcttgcatgctcatgg

SEQ ID NO: 5205 - DNA, 22 bp, Homo sapiens
  source 1..22: mol_type = other DNA
cattcttctctgcatgtcaggg

SEQ ID NO: 5206 - DNA, 22 bp, Homo sapiens
  source 1..22: mol_type = other DNA
tcagcatctctgctgctcaggg

SEQ ID NO: 5207 - DNA, 21 bp, Homo sapiens
  source 1..21: mol_type = other DNA
cactcacctccatgctcatgc

SEQ ID NO: 5208 - DNA, 23 bp, Homo sapiens
  source 1..23: mol_type = other DNA
gaaaaacatctccatgctcatgg

SEQ ID NO: 5209 - DNA, 22 bp, Homo sapiens
  source 1..22: mol_type = other DNA
taccaacccagcatgctcacga

SEQ ID NO: 5210 - DNA, 22 bp, Homo sapiens
  source 1..22: mol_type = other DNA
tagtacttctacatgcacaggg

SEQ ID NO: 5211 - DNA, 22 bp, Homo sapiens
  source 1..22: mol_type = other DNA
cgcccacctctgctgcccacgg

SEQ ID NO: 5212 - DNA, 23 bp, Homo sapiens
  source 1..23: mol_type = other DNA
ttcccaactcagcctgctcagtg

SEQ ID NO: 5213 - DNA, 23 bp, Homo sapiens
  source 1..23: mol_type = other DNA
cacacacatttgcatgttcatgg

SEQ ID NO: 5214 - DNA, 24 bp, Homo sapiens
  source 1..24: mol_type = other DNA
cactcacctcagccatgctgatgg

SEQ ID NO: 5215 - DNA, 23 bp, Homo sapiens
  source 1..23: mol_type = other DNA
tccataccactgcatgcttaaag

SEQ ID NO: 5216 - DNA, 23 bp, Homo sapiens
  source 1..23: mol_type = other DNA
tgtggacatctccatgctcaggg

SEQ ID NO: 5217 - DNA, 23 bp, Homo sapiens
  source 1..23: mol_type = other DNA
ttctcaaatttacatgctcgagg

SEQ ID NO: 5218 - DNA, 22 bp, Homo sapiens
  source 1..22: mol_type = other DNA
aggtcacctctgcacctcatgg

SEQ ID NO: 5219 - DNA, 21 bp, Homo sapiens
  source 1..21: mol_type = other DNA
ttcccaactctgcattcaggg

SEQ ID NO: 5220 - DNA, 23 bp, Homo sapiens
  source 1..23: mol_type = other DNA
tacttacctctgcctgcttctgg

SEQ ID NO: 5221 - DNA, 23 bp, Homo sapiens
  source 1..23: mol_type = other DNA
cacacacatatgcatgctcaagt

SEQ ID NO: 5222 - DNA, 22 bp, Homo sapiens
  source 1..22: mol_type = other DNA
tactcactctgcagtctcagcc

SEQ ID NO: 5223 - DNA, 23 bp, Homo sapiens
  source 1..23: mol_type = other DNA
ttcccacttttgcatgctcacat

SEQ ID NO: 5224 - DNA, 24 bp, Homo sapiens
  source 1..24: mol_type = other DNA
tactcacctctgatgtactccagg

SEQ ID NO: 5225 - DNA, 23 bp, Homo sapiens
  source 1..23: mol_type = other DNA
ttctcaccactgcatgctccctg

SEQ ID NO: 5226 - DNA, 21 bp, Homo sapiens
  source 1..21: mol_type = other DNA
tacacacctctgcacacactg

SEQ ID NO: 5227 - DNA, 23 bp, Homo sapiens
  source 1..23: mol_type = other DNA
aattcacctctgaatgctaaaca

SEQ ID NO: 5228 - DNA, 23 bp, Homo sapiens
  source 1..23: mol_type = other DNA
ttcccacccctgcatgctggagg

SEQ ID NO: 5229 - DNA, 23 bp, Homo sapiens
  source 1..23: mol_type = other DNA
tactcttccctggatgctttggg

SEQ ID NO: 5230 - DNA, 23 bp, Homo sapiens
  source 1..23: mol_type = other DNA
tattcacctctgcatctccacgt

SEQ ID NO: 5231 - DNA, 22 bp, Homo sapiens
  source 1..22: mol_type = other DNA
tactgacgtctgcatttcagtg

SEQ ID NO: 5232 - DNA, 23 bp, Homo sapiens
  source 1..23: mol_type = other DNA
taataccctctgcatgtgtatgg

SEQ ID NO: 5233 - DNA, 23 bp, Homo sapiens
  source 1..23: mol_type = other DNA
gactcacacctccaggctcctgg

SEQ ID NO: 5234 - DNA, 23 bp, Homo sapiens
  source 1..23: mol_type = other DNA
aaatcacaactgctggctcaggg

SEQ ID NO: 5235 - DNA, 22 bp, Homo sapiens
  source 1..22: mol_type = other DNA
tactcacctctccagctctggt

SEQ ID NO: 5236 - DNA, 25 bp, Homo sapiens
  source 1..25: mol_type = other DNA
aacctacctgtgccaatgctcaggg

SEQ ID NO: 5237 - DNA, 21 bp, Homo sapiens
  source 1..21: mol_type = other DNA
tcctcacccctgcactcaggt

SEQ ID NO: 5238 - DNA, 22 bp, Homo sapiens
  source 1..22: mol_type = other DNA
cactcacctctgcacctcacca

SEQ ID NO: 5239 - DNA, 23 bp, Homo sapiens
  source 1..23: mol_type = other DNA
cactcatctgttgatggtcatgg

SEQ ID NO: 5240 - DNA, 23 bp, Homo sapiens
  source 1..23: mol_type = other DNA
aacttacatctgcatgcccaaga

SEQ ID NO: 5241 - DNA, 23 bp, Homo sapiens
  source 1..23: mol_type = other DNA
tacttatctctgcatgcaccact

SEQ ID NO: 5242 - DNA, 22 bp, Homo sapiens
  source 1..22: mol_type = other DNA
tgctatctctgcatgagcaggg

SEQ ID NO: 5243 - DNA, 22 bp, Homo sapiens
  source 1..22: mol_type = other DNA
tactcaactctgctgctatagc

SEQ ID NO: 5244 - DNA, 23 bp, Homo sapiens
  source 1..23: mol_type = other DNA
cactcacccctgcatgccaaggc

SEQ ID NO: 5245 - DNA, 21 bp, Homo sapiens
  source 1..21: mol_type = other DNA
tacaccactacatgctcatgc

SEQ ID NO: 5246 - DNA, 22 bp, Homo sapiens
  source 1..22: mol_type = other DNA
tactatctctgcatgctctgtt

SEQ ID NO: 5247 - DNA, 22 bp, Homo sapiens
  source 1..22: mol_type = other DNA
cactcaccagtcatgctcaagg

SEQ ID NO: 5248 - DNA, 22 bp, Homo sapiens
  source 1..22: mol_type = other DNA
tacataccttacatactcatgg

SEQ ID NO: 5249 - DNA, 23 bp, Homo sapiens
  source 1..23: mol_type = other DNA
cagtcacctctgcatgtccgggt

SEQ ID NO: 5250 - DNA, 22 bp, Homo sapiens
  source 1..22: mol_type = other DNA
cattcacccagcatgctctggg

SEQ ID NO: 5251 - DNA, 21 bp, Homo sapiens
  source 1..21: mol_type = other DNA
taattatctgcatgctccagg

SEQ ID NO: 5252 - DNA, 23 bp, Homo sapiens
  source 1..23: mol_type = other DNA
tatttacctctgcctgctcagag

SEQ ID NO: 5253 - DNA, 23 bp, Homo sapiens
  source 1..23: mol_type = other DNA
tattcatctctgcatgctaagga

SEQ ID NO: 5254 - DNA, 23 bp, Homo sapiens
  source 1..23: mol_type = other DNA
tagctacctctgcatgtccaagg

SEQ ID NO: 5255 - DNA, 23 bp, Homo sapiens
  source 1..23: mol_type = other DNA
cccacatctctgcatgctcctgg

SEQ ID NO: 5256 - DNA, 23 bp, Homo sapiens
  source 1..23: mol_type = other DNA
ttccaaaccatgcatgctcaggg

SEQ ID NO: 5257 - DNA, 23 bp, Homo sapiens
  source 1..23: mol_type = other DNA
caaccacatctgcatgcttaggg

SEQ ID NO: 5258 - DNA, 22 bp, Homo sapiens
  source 1..22: mol_type = other DNA
tgctcaccctccatgcacaggg

SEQ ID NO: 5259 - DNA, 22 bp, Homo sapiens
  source 1..22: mol_type = other DNA
tccccacatctgatgctcatgg

SEQ ID NO: 5260 - DNA, 24 bp, Homo sapiens
  source 1..24: mol_type = other DNA
cactcacaatctgcatgctcaatg

SEQ ID NO: 5261 - DNA, 23 bp, Homo sapiens
  source 1..23: mol_type = other DNA
taattaccaaagcatgctctggg

SEQ ID NO: 5262 - DNA, 23 bp, Homo sapiens
  source 1..23: mol_type = other DNA
aaccccaccctgcatgcccaagg

SEQ ID NO: 5263 - DNA, 21 bp, Homo sapiens
  source 1..21: mol_type = other DNA
tcctcacttgcatgctcactg

SEQ ID NO: 5264 - DNA, 22 bp, Homo sapiens
  source 1..22: mol_type = other DNA
tactcagattgcatgctcacta

SEQ ID NO: 5265 - DNA, 23 bp, Homo sapiens
  source 1..23: mol_type = other DNA
tgcccacctctgcatcccaaagt

SEQ ID NO: 5266 - DNA, 23 bp, Homo sapiens
  source 1..23: mol_type = other DNA
ggttgacatctgcatgctcacag

SEQ ID NO: 5267 - DNA, 23 bp, Homo sapiens
  source 1..23: mol_type = other DNA
tgagcatatgtgcatgctcaagg

SEQ ID NO: 5268 - DNA, 23 bp, Homo sapiens
  source 1..23: mol_type = other DNA
atctcacctctccctgctcatgg

SEQ ID NO: 5269 - DNA, 23 bp, Homo sapiens
  source 1..23: mol_type = other DNA
ttcattcatctgcatgttcacgg

SEQ ID NO: 5270 - DNA, 23 bp, Homo sapiens
  source 1..23: mol_type = other DNA
cattcatgtatacatgctcaagg

SEQ ID NO: 5271 - DNA, 22 bp, Homo sapiens
  source 1..22: mol_type = other DNA
cgctcacctatgctgctcaagg

SEQ ID NO: 5272 - DNA, 23 bp, Homo sapiens
  source 1..23: mol_type = other DNA
taatcatctctgcatgagcagag

SEQ ID NO: 5273 - DNA, 22 bp, Homo sapiens
  source 1..22: mol_type = other DNA
tcctcgcactgcacgctcatgg

SEQ ID NO: 5274 - DNA, 23 bp, Homo sapiens
  source 1..23: mol_type = other DNA
ttctaacctctccttgctcctga

SEQ ID NO: 5275 - DNA, 22 bp, Homo sapiens
  source 1..22: mol_type = other DNA
ttccacctctgcctgctcgggc

SEQ ID NO: 5276 - DNA, 22 bp, Homo sapiens
  source 1..22: mol_type = other DNA
caccaacctctgctactcaagg

SEQ ID NO: 5277 - DNA, 23 bp, Homo sapiens
  source 1..23: mol_type = other DNA
tcctcatccctgcatgcataggg

SEQ ID NO: 5278 - DNA, 23 bp, Homo sapiens
  source 1..23: mol_type = other DNA
tacttaaagctacatgctcatga

SEQ ID NO: 5279 - DNA, 24 bp, Homo sapiens
  source 1..24: mol_type = other DNA
tgatcaccatcagcatgcccatgg

SEQ ID NO: 5280 - DNA, 23 bp, Homo sapiens
  source 1..23: mol_type = other DNA
aagccaccactgcatgttcatga

SEQ ID NO: 5281 - DNA, 23 bp, Homo sapiens
  source 1..23: mol_type = other DNA
taatcaccactgctttctcaaac

SEQ ID NO: 5282 - DNA, 23 bp, Homo sapiens
  source 1..23: mol_type = other DNA
tcctcaactcaacatgctcacct

SEQ ID NO: 5283 - DNA, 21 bp, Homo sapiens
  source 1..21: mol_type = other DNA
aactcaactgcatgttcaagg

SEQ ID NO: 5284 - DNA, 23 bp, Homo sapiens
  source 1..23: mol_type = other DNA
tactcaccactgtaagctcttta

SEQ ID NO: 5285 - DNA, 22 bp, Homo sapiens
  source 1..22: mol_type = other DNA
cactgtccctgcaggctcaggg

SEQ ID NO: 5286 - DNA, 23 bp, Homo sapiens
  source 1..23: mol_type = other DNA
taccatattctgcatgcacatgg

SEQ ID NO: 5287 - DNA, 21 bp, Homo sapiens
  source 1..21: mol_type = other DNA
tactcacctctcgtctcatgg

SEQ ID NO: 5288 - DNA, 23 bp, Homo sapiens
  source 1..23: mol_type = other DNA
cactcaacactctgtgctcaagg

SEQ ID NO: 5289 - DNA, 23 bp, Homo sapiens
  source 1..23: mol_type = other DNA
ttctaacctctgcatgggcaggg

SEQ ID NO: 5290 - DNA, 23 bp, Homo sapiens
  source 1..23: mol_type = other DNA
tgaacacctctgcatgctggggc

SEQ ID NO: 5291 - DNA, 23 bp, Homo sapiens
  source 1..23: mol_type = other DNA
tattctcctcagcaagctctttg

SEQ ID NO: 5292 - DNA, 24 bp, Homo sapiens
  source 1..24: mol_type = other DNA
cactcgcctactggaggctcaggg

SEQ ID NO: 5293 - DNA, 22 bp, Homo sapiens
  source 1..22: mol_type = other DNA
tgcttaactctgctgctctagg

SEQ ID NO: 5294 - DNA, 23 bp, Homo sapiens
  source 1..23: mol_type = other DNA
tgctcacctctgcctgccctagt

SEQ ID NO: 5295 - DNA, 23 bp, Homo sapiens
  source 1..23: mol_type = other DNA
tacccccctgtgcaagatcacga

SEQ ID NO: 5296 - DNA, 22 bp, Homo sapiens
  source 1..22: mol_type = other DNA
tactacctcggcatgctatagc

SEQ ID NO: 5297 - DNA, 23 bp, Homo sapiens
  source 1..23: mol_type = other DNA
cattcatctctgcatccctaagg

SEQ ID NO: 5298 - DNA, 24 bp, Homo sapiens
  source 1..24: mol_type = other DNA
cattcacctctgcttgtctcaggg

SEQ ID NO: 5299 - DNA, 22 bp, Homo sapiens
  source 1..22: mol_type = other DNA
gagtccctctgcatgctgctgg

SEQ ID NO: 5300 - DNA, 22 bp, Homo sapiens
  source 1..22: mol_type = other DNA
acctcacctcccatgctcaagg

SEQ ID NO: 5301 - DNA, 23 bp, Homo sapiens
  source 1..23: mol_type = other DNA
cacccacctctgcatgcacatgg

SEQ ID NO: 5302 - DNA, 22 bp, Homo sapiens
  source 1..22: mol_type = other DNA
tacacacccctgatgctcaagg

SEQ ID NO: 5303 - DNA, 23 bp, Homo sapiens
  source 1..23: mol_type = other DNA
cccttacctctgcatgcgcgtgg

SEQ ID NO: 5304 - DNA, 23 bp, Homo sapiens
  source 1..23: mol_type = other DNA
tggtcacctctgtatgctctggg

SEQ ID NO: 5305 - DNA, 22 bp, Homo sapiens
  source 1..22: mol_type = other DNA
cactaacctctgatgctcacag

SEQ ID NO: 5306 - DNA, 23 bp, Homo sapiens
  source 1..23: mol_type = other DNA
cactcacctctacagctccatgg

SEQ ID NO: 5307 - DNA, 22 bp, Homo sapiens
  source 1..22: mol_type = other DNA
tgcacaccttacatgctcacag

SEQ ID NO: 5308 - DNA, 22 bp, Homo sapiens
  source 1..22: mol_type = other DNA
aactcctactgcatgctcaaga

SEQ ID NO: 5309 - DNA, 24 bp, Homo sapiens
  source 1..24: mol_type = other DNA
cactcacctctacaacgctcatgg

SEQ ID NO: 5310 - DNA, 23 bp, Homo sapiens
  source 1..23: mol_type = other DNA
ctcccacctccacatgctcgggg

SEQ ID NO: 5311 - DNA, 24 bp, Homo sapiens
  source 1..24: mol_type = other DNA
tactcacccactgcacgcccaggg

SEQ ID NO: 5312 - DNA, 24 bp, Homo sapiens
  source 1..24: mol_type = other DNA
tcctccttcactgcatgctcaggg

SEQ ID NO: 5313 - DNA, 24 bp, Homo sapiens
  source 1..24: mol_type = other DNA
tgagcacctattgcatgctcatgg

SEQ ID NO: 5314 - DNA, 22 bp, Homo sapiens
  source 1..22: mol_type = other DNA
gacctccactgcatgctcaaag

SEQ ID NO: 5315 - DNA, 23 bp, Homo sapiens
  source 1..23: mol_type = other DNA
aactccacacagcatgctcttgg

SEQ ID NO: 5316 - DNA, 22 bp, Homo sapiens
  source 1..22: mol_type = other DNA
gactcatctctgatgcacaagg

SEQ ID NO: 5317 - DNA, 22 bp, Homo sapiens
  source 1..22: mol_type = other DNA
tattcactctgcaaactcatgg

SEQ ID NO: 5318 - DNA, 22 bp, Homo sapiens
  source 1..22: mol_type = other DNA
agctcatctctcatgctctagg

SEQ ID NO: 5319 - DNA, 23 bp, Homo sapiens
  source 1..23: mol_type = other DNA
atgtcacctctgctagctcagag

SEQ ID NO: 5320 - DNA, 23 bp, Homo sapiens
  source 1..23: mol_type = other DNA
catttgccactgcatgctcgtgg

SEQ ID NO: 5321 - DNA, 23 bp, Homo sapiens
  source 1..23: mol_type = other DNA
agcacaccactgcatgcccacag

SEQ ID NO: 5322 - DNA, 23 bp, Homo sapiens
  source 1..23: mol_type = other DNA
aactcacccctgcatccccaagg

SEQ ID NO: 5323 - DNA, 24 bp, Homo sapiens
  source 1..24: mol_type = other DNA
ttttcacctattgcatgttcaggg

SEQ ID NO: 5324 - DNA, 23 bp, Homo sapiens
  source 1..23: mol_type = other DNA
aatctgcatctgcatgctcaagg

SEQ ID NO: 5325 - DNA, 23 bp, Homo sapiens
  source 1..23: mol_type = other DNA
gacagacacatgcatgctcatgg

SEQ ID NO: 5326 - DNA, 22 bp, Homo sapiens
  source 1..22: mol_type = other DNA
aactcaccctgcatacttgggg

SEQ ID NO: 5327 - DNA, 23 bp, Homo sapiens
  source 1..23: mol_type = other DNA
tacatgcctatgcatgcgcatgg

SEQ ID NO: 5328 - DNA, 22 bp, Homo sapiens
  source 1..22: mol_type = other DNA
ctctcacctctgcctctcaaag

SEQ ID NO: 5329 - DNA, 24 bp, Homo sapiens
  source 1..24: mol_type = other DNA
tattcacctccacacagctcaggg

SEQ ID NO: 5330 - DNA, 21 bp, Homo sapiens
  source 1..21: mol_type = other DNA
tcctcacctctgtgctcaggg

SEQ ID NO: 5331 - DNA, 22 bp, Homo sapiens
  source 1..22: mol_type = other DNA
tgctcaccctgcaaactcagga

SEQ ID NO: 5332 - DNA, 22 bp, Homo sapiens
  source 1..22: mol_type = other DNA
tactcacctctcatcttcagga

SEQ ID NO: 5333 - DNA, 22 bp, Homo sapiens
  source 1..22: mol_type = other DNA
tgctcactcaacatgttcatgg

SEQ ID NO: 5334 - DNA, 23 bp, Homo sapiens
  source 1..23: mol_type = other DNA
aaagctcctctgcacgctcatgg

SEQ ID NO: 5335 - DNA, 23 bp, Homo sapiens
  source 1..23: mol_type = other DNA
ctgacacctttgcatgctcatga

SEQ ID NO: 5336 - DNA, 23 bp, Homo sapiens
  source 1..23: mol_type = other DNA
cacgcaaccctgcatgctcacag

SEQ ID NO: 5337 - DNA, 23 bp, Homo sapiens
  source 1..23: mol_type = other DNA
tatggggctctgcatgctcttgg

SEQ ID NO: 5338 - DNA, 24 bp, Homo sapiens
  source 1..24: mol_type = other DNA
tgcaaatcctctgcctgctcacgg

SEQ ID NO: 5339 - DNA, 22 bp, Homo sapiens
  source 1..22: mol_type = other DNA
gactcactcagcatgctctgga

SEQ ID NO: 5340 - DNA, 23 bp, Homo sapiens
  source 1..23: mol_type = other DNA
acctcccagctgcatgctcttgg

SEQ ID NO: 5341 - DNA, 22 bp, Homo sapiens
  source 1..22: mol_type = other DNA
gcctgaccactgctgctcaagg

SEQ ID NO: 5342 - DNA, 23 bp, Homo sapiens
  source 1..23: mol_type = other DNA
tcctcacctccccatactcaacg

SEQ ID NO: 5343 - DNA, 23 bp, Homo sapiens
  source 1..23: mol_type = other DNA
cactctcctcatcatgctgacag

SEQ ID NO: 5344 - DNA, 23 bp, Homo sapiens
  source 1..23: mol_type = other DNA
tccctacctctgcaggctcaggt

SEQ ID NO: 5345 - DNA, 21 bp, Homo sapiens
  source 1..21: mol_type = other DNA
tacccacccctgcactcaggg

SEQ ID NO: 5346 - DNA, 23 bp, Homo sapiens
  source 1..23: mol_type = other DNA
gagccgcctctgcttgctcgtgg

SEQ ID NO: 5347 - DNA, 23 bp, Homo sapiens
  source 1..23: mol_type = other DNA
ccctcaactctgcatgttaaggc

SEQ ID NO: 5348 - DNA, 23 bp, Homo sapiens
  source 1..23: mol_type = other DNA
tacatccctatgcctgctcatgg

SEQ ID NO: 5349 - DNA, 23 bp, Homo sapiens
  source 1..23: mol_type = other DNA
cacacacatctggaagctcctgg

SEQ ID NO: 5350 - DNA, 23 bp, Homo sapiens
  source 1..23: mol_type = other DNA
gactcaaagatccatgctcatgg

SEQ ID NO: 5351 - DNA, 24 bp, Homo sapiens
  source 1..24: mol_type = other DNA
tactcatcatctgcatggtcactc

SEQ ID NO: 5352 - DNA, 22 bp, Homo sapiens
  source 1..22: mol_type = other DNA
tcctcacactggatgctcatga

SEQ ID NO: 5353 - DNA, 22 bp, Homo sapiens
  source 1..22: mol_type = other DNA
taagaacctctgctgcacaggg

SEQ ID NO: 5354 - DNA, 22 bp, Homo sapiens
  source 1..22: mol_type = other DNA
cactcacctcggcctctcaaag

SEQ ID NO: 5355 - DNA, 23 bp, Homo sapiens
  source 1..23: mol_type = other DNA
tacatacatgtgaatgctcattg

SEQ ID NO: 5356 - DNA, 23 bp, Homo sapiens
  source 1..23: mol_type = other DNA
tactcacctccgcatcaccagct

SEQ ID NO: 5357 - DNA, 23 bp, Homo sapiens
  source 1..23: mol_type = other DNA
gacctacctatgcatgcatatgg

SEQ ID NO: 5358 - DNA, 22 bp, Homo sapiens
  source 1..22: mol_type = other DNA
tgcacactctgcatgctcacct

SEQ ID NO: 5359 - DNA, 23 bp, Homo sapiens
  source 1..23: mol_type = other DNA
tatttacctctccatgttccttg

SEQ ID NO: 5360 - DNA, 22 bp, Homo sapiens
  source 1..22: mol_type = other DNA
tactaaccttgccagctgaggg

SEQ ID NO: 5361 - DNA, 22 bp, Homo sapiens
  source 1..22: mol_type = other DNA
tgctcaccccacatgctcatgg

SEQ ID NO: 5362 - DNA, 22 bp, Homo sapiens
  source 1..22: mol_type = other DNA
ccttcacctctgcatctcaggg

SEQ ID NO: 5363 - DNA, 22 bp, Homo sapiens
  source 1..22: mol_type = other DNA
atctcaccctacaagctcaggg

SEQ ID NO: 5364 - DNA, 22 bp, Homo sapiens
  source 1..22: mol_type = other DNA
cacacacccagcatgttcaagg

SEQ ID NO: 5365 - DNA, 23 bp, Homo sapiens
  source 1..23: mol_type = other DNA
tactcaccactgtatgcccaatg

SEQ ID NO: 5366 - DNA, 23 bp, Homo sapiens
  source 1..23: mol_type = other DNA
tttgctacactgcatgctcatgg

SEQ ID NO: 5367 - DNA, 23 bp, Homo sapiens
  source 1..23: mol_type = other DNA
tgaaccccactgcatgctcttgg

SEQ ID NO: 5368 - DNA, 23 bp, Homo sapiens
  source 1..23: mol_type = other DNA
tatttacccatgcatgctcatgg

SEQ ID NO: 5369 - DNA, 22 bp, Homo sapiens
  source 1..22: mol_type = other DNA
tactcatactgcatgcacaggc

SEQ ID NO: 5370 - DNA, 22 bp, Homo sapiens
  source 1..22: mol_type = other DNA
gggtcacctctccatgtcaggg

SEQ ID NO: 5371 - DNA, 23 bp, Homo sapiens
  source 1..23: mol_type = other DNA
tcctcatctctgcatgctcaggt

SEQ ID NO: 5372 - DNA, 21 bp, Homo sapiens
  source 1..21: mol_type = other DNA
tatccatctgtatgctcatgg

SEQ ID NO: 5373 - DNA, 22 bp, Homo sapiens
  source 1..22: mol_type = other DNA
tactcgctctacatgctcagaa

SEQ ID NO: 5374 - DNA, 23 bp, Homo sapiens
  source 1..23: mol_type = other DNA
tcctcacctcagcatgtcaaagc

SEQ ID NO: 5375 - DNA, 21 bp, Homo sapiens
  source 1..21: mol_type = other DNA
tactcactggcatgctcaaag

SEQ ID NO: 5376 - DNA, 22 bp, Homo sapiens
  source 1..22: mol_type = other DNA
tgctcaccccgtatgctcatag

SEQ ID NO: 5377 - DNA, 21 bp, Homo sapiens
  source 1..21: mol_type = other DNA
tccttcactgcatgctcaggg

SEQ ID NO: 5378 - DNA, 24 bp, Homo sapiens
  source 1..24: mol_type = other DNA
cacacactccctgcatgctcacag

SEQ ID NO: 5379 - DNA, 23 bp, Homo sapiens
  source 1..23: mol_type = other DNA
atctttcctatgcatgctcagga

SEQ ID NO: 5380 - DNA, 23 bp, Homo sapiens
  source 1..23: mol_type = other DNA
aactcaccactacttgcacaggg

SEQ ID NO: 5381 - DNA, 22 bp, Homo sapiens
  source 1..22: mol_type = other DNA
tatttaatttgcatgctcaggg

SEQ ID NO: 5382 - DNA, 22 bp, Homo sapiens
  source 1..22: mol_type = other DNA
gcatcacatctgatgctcatgg

SEQ ID NO: 5383 - DNA, 22 bp, Homo sapiens
  source 1..22: mol_type = other DNA
cactcaccccgcatgcgcagag

SEQ ID NO: 5384 - DNA, 24 bp, Homo sapiens
  source 1..24: mol_type = other DNA
tcctctctcactgcatgctcagtg

SEQ ID NO: 5385 - DNA, 23 bp, Homo sapiens
  source 1..23: mol_type = other DNA
tataatgctctgcatgctcagag

SEQ ID NO: 5386 - DNA, 22 bp, Homo sapiens
  source 1..22: mol_type = other DNA
tagtccctaagcatgctcttgg

SEQ ID NO: 5387 - DNA, 23 bp, Homo sapiens
  source 1..23: mol_type = other DNA
ttcacagttctacatgctcaggg

SEQ ID NO: 5388 - DNA, 23 bp, Homo sapiens
  source 1..23: mol_type = other DNA
aactcacgtcagcttgctcttgg

SEQ ID NO: 5389 - DNA, 22 bp, Homo sapiens
  source 1..22: mol_type = other DNA
cacccactctgcaggctccggg

SEQ ID NO: 5390 - DNA, 23 bp, Homo sapiens
  source 1..23: mol_type = other DNA
ctaccacctatgcttgctcaagg

SEQ ID NO: 5391 - DNA, 23 bp, Homo sapiens
  source 1..23: mol_type = other DNA
tctgcatttctgcatgctccagg

SEQ ID NO: 5392 - DNA, 23 bp, Homo sapiens
  source 1..23: mol_type = other DNA
tggtcacttctccatgctcatgg

SEQ ID NO: 5393 - DNA, 22 bp, Homo sapiens
  source 1..22: mol_type = other DNA
acctcacctctgcagctaaggt

SEQ ID NO: 5394 - DNA, 22 bp, Homo sapiens
  source 1..22: mol_type = other DNA
tactctccccgtatgctcatag

SEQ ID NO: 5395 - DNA, 23 bp, Homo sapiens
  source 1..23: mol_type = other DNA
cccagacctctgcatgcagatgg

SEQ ID NO: 5396 - DNA, 22 bp, Homo sapiens
  source 1..22: mol_type = other DNA
catccacctctccagctcaagg

SEQ ID NO: 5397 - DNA, 22 bp, Homo sapiens
  source 1..22: mol_type = other DNA
aaatccatctgcatgctcattg

SEQ ID NO: 5398 - DNA, 22 bp, Homo sapiens
  source 1..22: mol_type = other DNA
tcttcacccctcatgctcagga

SEQ ID NO: 5399 - DNA, 22 bp, Homo sapiens
  source 1..22: mol_type = other DNA
ttctcaccactgcagcacatgg

SEQ ID NO: 5400 - DNA, 22 bp, Homo sapiens
  source 1..22: mol_type = other DNA
tactcaatccgcgtgcccatgg

SEQ ID NO: 5401 - DNA, 22 bp, Homo sapiens
  source 1..22: mol_type = other DNA
tagtcagcactgcatctcaagg

SEQ ID NO: 5402 - DNA, 23 bp, Homo sapiens
  source 1..23: mol_type = other DNA
ttttcacctctgcaggctcagaa

SEQ ID NO: 5403 - DNA, 21 bp, Homo sapiens
  source 1..21: mol_type = other DNA
ccctcacctctgcactctggg

SEQ ID NO: 5404 - DNA, 22 bp, Homo sapiens
  source 1..22: mol_type = other DNA
tactcatgactgatgctcaccg

SEQ ID NO: 5405 - DNA, 22 bp, Homo sapiens
  source 1..22: mol_type = other DNA
cacccacctctgcttctcaaag

SEQ ID NO: 5406 - DNA, 23 bp, Homo sapiens
  source 1..23: mol_type = other DNA
tacccacaagtgcaggctcaaga

SEQ ID NO: 5407 - DNA, 23 bp, Homo sapiens
  source 1..23: mol_type = other DNA
caattacctctgcatgttctttg

SEQ ID NO: 5408 - DNA, 23 bp, Homo sapiens
  source 1..23: mol_type = other DNA
ccccgaactctgcatcctcaggg

SEQ ID NO: 5409 - DNA, 23 bp, Homo sapiens
  source 1..23: mol_type = other DNA
caatcacctccccatcctcacga

SEQ ID NO: 5410 - DNA, 24 bp, Homo sapiens
  source 1..24: mol_type = other DNA
cactcacctgctgcatgaccctgg

SEQ ID NO: 5411 - DNA, 23 bp, Homo sapiens
  source 1..23: mol_type = other DNA
gtctcacctctgcctgttgaggg

SEQ ID NO: 5412 - DNA, 23 bp, Homo sapiens
  source 1..23: mol_type = other DNA
tactcacattggcctgctccctg

SEQ ID NO: 5413 - DNA, 23 bp, Homo sapiens
  source 1..23: mol_type = other DNA
tagtgacctgtacatgctcaaat

SEQ ID NO: 5414 - DNA, 24 bp, Homo sapiens
  source 1..24: mol_type = other DNA
tattcagcctctgcacgcaccggg

SEQ ID NO: 5415 - DNA, 22 bp, Homo sapiens
  source 1..22: mol_type = other DNA
taccacatctgcatgccccttg

SEQ ID NO: 5416 - DNA, 22 bp, Homo sapiens
  source 1..22: mol_type = other DNA
tactcacatctcatactcacat

SEQ ID NO: 5417 - DNA, 23 bp, Homo sapiens
  source 1..23: mol_type = other DNA
aacttacctctgcatcctgtgga

SEQ ID NO: 5418 - DNA, 23 bp, Homo sapiens
  source 1..23: mol_type = other DNA
ttctatactctccatggtcaggg

SEQ ID NO: 5419 - DNA, 23 bp, Homo sapiens
  source 1..23: mol_type = other DNA
ttctctcatctccaggctcagag

SEQ ID NO: 5420 - DNA, 23 bp, Homo sapiens
  source 1..23: mol_type = other DNA
gagtcaacactgcatgggcaggg

SEQ ID NO: 5421 - DNA, 25 bp, Homo sapiens
  source 1..25: mol_type = other DNA
tactcacctctcagcatactggagg

SEQ ID NO: 5422 - DNA, 22 bp, Homo sapiens
  source 1..22: mol_type = other DNA
tactcactcttcatgcttacct

SEQ ID NO: 5423 - DNA, 23 bp, Homo sapiens
  source 1..23: mol_type = other DNA
tgtgcacctctccatgtccaggg

SEQ ID NO: 5424 - DNA, 22 bp, Homo sapiens
  source 1..22: mol_type = other DNA
cactcaccactgcatcccacgg

SEQ ID NO: 5425 - DNA, 22 bp, Homo sapiens
  source 1..22: mol_type = other DNA
cactcacctcttcatctcaggg

SEQ ID NO: 5426 - DNA, 22 bp, Homo sapiens
  source 1..22: mol_type = other DNA
cactcacactacatgatcatgg

SEQ ID NO: 5427 - DNA, 22 bp, Homo sapiens
  source 1..22: mol_type = other DNA
tactcacctcttcatctcagga

SEQ ID NO: 5428 - DNA, 23 bp, Homo sapiens
  source 1..23: mol_type = other DNA
taatcacctctgcatggagaggg

SEQ ID NO: 5429 - DNA, 21 bp, Homo sapiens
  source 1..21: mol_type = other DNA
tacccacctccatgcccaggg

SEQ ID NO: 5430 - DNA, 23 bp, Homo sapiens
  source 1..23: mol_type = other DNA
aaaacatatctgcatgctcgtgg

SEQ ID NO: 5431 - DNA, 23 bp, Homo sapiens
  source 1..23: mol_type = other DNA
atctcagtactgcatgctcttgg

SEQ ID NO: 5432 - DNA, 22 bp, Homo sapiens
  source 1..22: mol_type = other DNA
ttctcaccttacttgctcaagg

SEQ ID NO: 5433 - DNA, 23 bp, Homo sapiens
  source 1..23: mol_type = other DNA
ggccctactctgcatgctcactg

SEQ ID NO: 5434 - DNA, 22 bp, Homo sapiens
  source 1..22: mol_type = other DNA
gactacatctgcatgctcagag

SEQ ID NO: 5435 - DNA, 22 bp, Homo sapiens
  source 1..22: mol_type = other DNA
tgagcacctctgcatctccagg

SEQ ID NO: 5436 - DNA, 22 bp, Homo sapiens
  source 1..22: mol_type = other DNA
ttctcacctctgctgttcatga

SEQ ID NO: 5437 - DNA, 22 bp, Homo sapiens
  source 1..22: mol_type = other DNA
tttttacctctgcatgtcctgg

SEQ ID NO: 5438 - DNA, 22 bp, Homo sapiens
  source 1..22: mol_type = other DNA
tcctcatcatgcatgctcagga

SEQ ID NO: 5439 - DNA, 22 bp, Homo sapiens
  source 1..22: mol_type = other DNA
tattccaactgcatgctcagag

SEQ ID NO: 5440 - DNA, 23 bp, Homo sapiens
  source 1..23: mol_type = other DNA
tggtgacctctgcatgctcaaga

SEQ ID NO: 5441 - DNA, 23 bp, Homo sapiens
  source 1..23: mol_type = other DNA
ggcccacatctgcaagctcatgg

SEQ ID NO: 5442 - DNA, 23 bp, Homo sapiens
  source 1..23: mol_type = other DNA
caggaacctctgcatgcactagg

SEQ ID NO: 5443 - DNA, 23 bp, Homo sapiens
  source 1..23: mol_type = other DNA
tgctcctctactcatgctcaggg

SEQ ID NO: 5444 - DNA, 22 bp, Homo sapiens
  source 1..22: mol_type = other DNA
cattccatctgcatgttcatgg

SEQ ID NO: 5445 - DNA, 22 bp, Homo sapiens
  source 1..22: mol_type = other DNA
tactcacccctgctgctcttaa

SEQ ID NO: 5446 - DNA, 22 bp, Homo sapiens
  source 1..22: mol_type = other DNA
tactttcactgcacgctcatgg

SEQ ID NO: 5447 - DNA, 23 bp, Homo sapiens
  source 1..23: mol_type = other DNA
aacacacccctgcatgctccaga

SEQ ID NO: 5448 - DNA, 23 bp, Homo sapiens
  source 1..23: mol_type = other DNA
aaatttcctctgcatgcacaagg

SEQ ID NO: 5449 - DNA, 22 bp, Homo sapiens
  source 1..22: mol_type = other DNA
tacaaacatctcatgctcatgg

SEQ ID NO: 5450 - DNA, 21 bp, Homo sapiens
  source 1..21: mol_type = other DNA
tactcagctgcatactcagag

SEQ ID NO: 5451 - DNA, 23 bp, Homo sapiens
  source 1..23: mol_type = other DNA
tccactcctcagcatgcccatgg

SEQ ID NO: 5452 - DNA, 22 bp, Homo sapiens
  source 1..22: mol_type = other DNA
tatgccctcaccatgctcatgg

SEQ ID NO: 5453 - DNA, 23 bp, Homo sapiens
  source 1..23: mol_type = other DNA
tactcacccacacatgcctatgg

SEQ ID NO: 5454 - DNA, 23 bp, Homo sapiens
  source 1..23: mol_type = other DNA
tacgcacatctctatgctcagat

SEQ ID NO: 5455 - DNA, 23 bp, Homo sapiens
  source 1..23: mol_type = other DNA
tgcccacctttgcttgcccaaga

SEQ ID NO: 5456 - DNA, 23 bp, Homo sapiens
  source 1..23: mol_type = other DNA
tactctaatctacatgcttagga

SEQ ID NO: 5457 - DNA, 23 bp, Homo sapiens
  source 1..23: mol_type = other DNA
atttcaccattgcatgctcatgt

SEQ ID NO: 5458 - DNA, 22 bp, Homo sapiens
  source 1..22: mol_type = other DNA
ctctcacctctgcgtctcaaag

SEQ ID NO: 5459 - DNA, 24 bp, Homo sapiens
  source 1..24: mol_type = other DNA
tactcgacctctgcatgctccagc

SEQ ID NO: 5460 - DNA, 23 bp, Homo sapiens
  source 1..23: mol_type = other DNA
tcctcacctcagaatgctccact

SEQ ID NO: 5461 - DNA, 23 bp, Homo sapiens
  source 1..23: mol_type = other DNA
ttctcaccgctgcatgtttactg

SEQ ID NO: 5462 - DNA, 24 bp, Homo sapiens
  source 1..24: mol_type = other DNA
gacagacctacttcatgctcaagg

SEQ ID NO: 5463 - DNA, 23 bp, Homo sapiens
  source 1..23: mol_type = other DNA
cactcacataggcatgcacagag

SEQ ID NO: 5464 - DNA, 23 bp, Homo sapiens
  source 1..23: mol_type = other DNA
ggctcgcctaagcatgcccatgg

SEQ ID NO: 5465 - DNA, 23 bp, Homo sapiens
  source 1..23: mol_type = other DNA
taaacaacacagcctgctcaggg

SEQ ID NO: 5466 - DNA, 23 bp, Homo sapiens
  source 1..23: mol_type = other DNA
tactcacttctacatgtttgaag

SEQ ID NO: 5467 - DNA, 23 bp, Homo sapiens
  source 1..23: mol_type = other DNA
tgctcagcactgcatgctgagaa

SEQ ID NO: 5468 - DNA, 24 bp, Homo sapiens
  source 1..24: mol_type = other DNA
taagcacctactgaatgctcaggg

SEQ ID NO: 5469 - DNA, 24 bp, Homo sapiens
  source 1..24: mol_type = other DNA
tgcttacctctaacatgctcagga

SEQ ID NO: 5470 - DNA, 23 bp, Homo sapiens
  source 1..23: mol_type = other DNA
cactcactggaccatgctcaagg

SEQ ID NO: 5471 - DNA, 23 bp, Homo sapiens
  source 1..23: mol_type = other DNA
tactcactcccccattctcatgc

SEQ ID NO: 5472 - DNA, 21 bp, Homo sapiens
  source 1..21: mol_type = other DNA
ttatcacctctgctctcaggg

SEQ ID NO: 5473 - DNA, 23 bp, Homo sapiens
  source 1..23: mol_type = other DNA
ttttctactctgcataatcatgg

SEQ ID NO: 5474 - DNA, 23 bp, Homo sapiens
  source 1..23: mol_type = other DNA
acctcacctctgcctgctctggg

SEQ ID NO: 5475 - DNA, 23 bp, Homo sapiens
  source 1..23: mol_type = other DNA
cactcacctctccatctccaggt

SEQ ID NO: 5476 - DNA, 23 bp, Homo sapiens
  source 1..23: mol_type = other DNA
tcctcacctctgcattcaacggc

SEQ ID NO: 5477 - DNA, 23 bp, Homo sapiens
  source 1..23: mol_type = other DNA
gacccacctctacatgctcaggt

SEQ ID NO: 5478 - DNA, 22 bp, Homo sapiens
  source 1..22: mol_type = other DNA
gaattacctcccatgctcaggg

SEQ ID NO: 5479 - DNA, 22 bp, Homo sapiens
  source 1..22: mol_type = other DNA
gactcacatctcatgcccatgg

SEQ ID NO: 5480 - DNA, 23 bp, Homo sapiens
  source 1..23: mol_type = other DNA
aaatcacctctgcacgctcctgg

SEQ ID NO: 5481 - DNA, 22 bp, Homo sapiens
  source 1..22: mol_type = other DNA
ctctcacctctcatgctaaatg

SEQ ID NO: 5482 - DNA, 23 bp, Homo sapiens
  source 1..23: mol_type = other DNA
atcccacatctacatgctcttgg

SEQ ID NO: 5483 - DNA, 21 bp, Homo sapiens
  source 1..21: mol_type = other DNA
gactcctatgcatgcttaagg

SEQ ID NO: 5484 - DNA, 22 bp, Homo sapiens
  source 1..22: mol_type = other DNA
ttatcacctcttcatctcttgg

SEQ ID NO: 5485 - DNA, 23 bp, Homo sapiens
  source 1..23: mol_type = other DNA
tcaccaccccaacatgctcaggg

SEQ ID NO: 5486 - DNA, 23 bp, Homo sapiens
  source 1..23: mol_type = other DNA
gcgccacctctgcatggtcatgg

SEQ ID NO: 5487 - DNA, 23 bp, Homo sapiens
  source 1..23: mol_type = other DNA
cacacacacatgcatgcacatgg

SEQ ID NO: 5488 - DNA, 22 bp, Homo sapiens
  source 1..22: mol_type = other DNA
ctgtcacctctgcatgacatgg

SEQ ID NO: 5489 - DNA, 22 bp, Homo sapiens
  source 1..22: mol_type = other DNA
gacgcagtctgcatgctcgtgg

SEQ ID NO: 5490 - DNA, 23 bp, Homo sapiens
  source 1..23: mol_type = other DNA
gacacactgatgcatgctcacag

SEQ ID NO: 5491 - DNA, 23 bp, Homo sapiens
  source 1..23: mol_type = other DNA
ttgttaccactgcatgccctggg

SEQ ID NO: 5492 - DNA, 22 bp, Homo sapiens
  source 1..22: mol_type = other DNA
ctctcacctccgcatctcaagt

SEQ ID NO: 5493 - DNA, 22 bp, Homo sapiens
  source 1..22: mol_type = other DNA
ttcaccccctgcatgctcaaag

SEQ ID NO: 5494 - DNA, 23 bp, Homo sapiens
  source 1..23: mol_type = other DNA
cccgcacccatgcatgctccagg

SEQ ID NO: 5495 - DNA, 23 bp, Homo sapiens
  source 1..23: mol_type = other DNA
atcaaacctctgcatggtcaagg

SEQ ID NO: 5496 - DNA, 22 bp, Homo sapiens
  source 1..22: mol_type = other DNA
tagccacatctgcatctccagg

SEQ ID NO: 5497 - DNA, 22 bp, Homo sapiens
  source 1..22: mol_type = other DNA
ttcttccactgcatgcccaagg

SEQ ID NO: 5498 - DNA, 22 bp, Homo sapiens
  source 1..22: mol_type = other DNA
gcctcacctctcatgctttagg

SEQ ID NO: 5499 - DNA, 23 bp, Homo sapiens
  source 1..23: mol_type = other DNA
tgcacacctgcgcatgctcagtg

SEQ ID NO: 5500 - DNA, 21 bp, Homo sapiens
  source 1..21: mol_type = other DNA
tgctcacccccatgctccggg

SEQ ID NO: 5501 - DNA, 23 bp, Homo sapiens
  source 1..23: mol_type = other DNA
tgttcacctctgtatgtccatgt

SEQ ID NO: 5502 - DNA, 23 bp, Homo sapiens
  source 1..23: mol_type = other DNA
tactccaatatgcatgctcatgc

SEQ ID NO: 5503 - DNA, 23 bp, Homo sapiens
  source 1..23: mol_type = other DNA
tacttacacttgcatgctcagca

SEQ ID NO: 5504 - DNA, 23 bp, Homo sapiens
  source 1..23: mol_type = other DNA
acctcatcactgcatgcccctgg

SEQ ID NO: 5505 - DNA, 23 bp, Homo sapiens
  source 1..23: mol_type = other DNA
ttcacacatgtgcatgctcacac

SEQ ID NO: 5506 - DNA, 23 bp, Homo sapiens
  source 1..23: mol_type = other DNA
aacacacatgtgcatgcacatgg

SEQ ID NO: 5507 - DNA, 23 bp, Homo sapiens
  source 1..23: mol_type = other DNA
taaagatatctgcatgctcatgt

SEQ ID NO: 5508 - DNA, 22 bp, Homo sapiens
  source 1..22: mol_type = other DNA
aacccacctctactactcacgg

SEQ ID NO: 5509 - DNA, 21 bp, Homo sapiens
  source 1..21: mol_type = other DNA
aactcatttgcatgctcaaag

SEQ ID NO: 5510 - DNA, 23 bp, Homo sapiens
  source 1..23: mol_type = other DNA
ctcacactcctgcatgcccaagg

SEQ ID NO: 5511 - DNA, 24 bp, Homo sapiens
  source 1..24: mol_type = other DNA
tacccaccttctgcctgctcaggg

SEQ ID NO: 5512 - DNA, 22 bp, Homo sapiens
  source 1..22: mol_type = other DNA
aaatctcccctgctgctcatgg

SEQ ID NO: 5513 - DNA, 21 bp, Homo sapiens
  source 1..21: mol_type = other DNA
tactcacctgtgtgctcacct

SEQ ID NO: 5514 - DNA, 21 bp, Homo sapiens
  source 1..21: mol_type = other DNA
tactcatctgtaagcgcaggg

SEQ ID NO: 5515 - DNA, 22 bp, Homo sapiens
  source 1..22: mol_type = other DNA
aactcaggctgcatcctcaagg

SEQ ID NO: 5516 - DNA, 23 bp, Homo sapiens
  source 1..23: mol_type = other DNA
tactcccctctgcatcctgagtt

SEQ ID NO: 5517 - DNA, 23 bp, Homo sapiens
  source 1..23: mol_type = other DNA
tggtcacctctgcacgctattgg

SEQ ID NO: 5518 - DNA, 23 bp, Homo sapiens
  source 1..23: mol_type = other DNA
tactcactactgcatccactgtg

SEQ ID NO: 5519 - DNA, 24 bp, Homo sapiens
  source 1..24: mol_type = other DNA
tactcacctcagcatctatcaagg

SEQ ID NO: 5520 - DNA, 23 bp, Homo sapiens
  source 1..23: mol_type = other DNA
acctcacctttgcctgcacatgg

SEQ ID NO: 5521 - DNA, 23 bp, Homo sapiens
  source 1..23: mol_type = other DNA
cattcacctctgcatggctaggg

SEQ ID NO: 5522 - DNA, 23 bp, Homo sapiens
  source 1..23: mol_type = other DNA
tactcacactctcatgttcatgg

SEQ ID NO: 5523 - DNA, 22 bp, Homo sapiens
  source 1..22: mol_type = other DNA
tactcattcagcatgctctgag

SEQ ID NO: 5524 - DNA, 23 bp, Homo sapiens
  source 1..23: mol_type = other DNA
ctattacctctgcatgctcagtg

SEQ ID NO: 5525 - DNA, 22 bp, Homo sapiens
  source 1..22: mol_type = other DNA
gtctcacccaacatgctcaagg

SEQ ID NO: 5526 - DNA, 23 bp, Homo sapiens
  source 1..23: mol_type = other DNA
tacacacctcttcatgcacatgg

SEQ ID NO: 5527 - DNA, 23 bp, Homo sapiens
  source 1..23: mol_type = other DNA
tactcacttctacatgctgaagg

SEQ ID NO: 5528 - DNA, 22 bp, Homo sapiens
  source 1..22: mol_type = other DNA
acaacacctctgcatgccaggg

SEQ ID NO: 5529 - DNA, 23 bp, Homo sapiens
  source 1..23: mol_type = other DNA
cactcacctctacatgctggagg

SEQ ID NO: 5530 - DNA, 21 bp, Homo sapiens
  source 1..21: mol_type = other DNA
aactcacctgtatgctccagg

SEQ ID NO: 5531 - DNA, 22 bp, Homo sapiens
  source 1..22: mol_type = other DNA
gaaacacattgcatgctcatgg

SEQ ID NO: 5532 - DNA, 23 bp, Homo sapiens
  source 1..23: mol_type = other DNA
ctctcaccactgcatgcactctg

SEQ ID NO: 5533 - DNA, 23 bp, Homo sapiens
  source 1..23: mol_type = other DNA
gggctacctctgcatggtcatgg

SEQ ID NO: 5534 - DNA, 22 bp, Homo sapiens
  source 1..22: mol_type = other DNA
gtcgcacctctgcatctcatga

SEQ ID NO: 5535 - DNA, 23 bp, Homo sapiens
  source 1..23: mol_type = other DNA
tcctcacctctgcatgatccaca

SEQ ID NO: 5536 - DNA, 22 bp, Homo sapiens
  source 1..22: mol_type = other DNA
ctcccacctctgctgctcgtgg

SEQ ID NO: 5537 - DNA, 22 bp, Homo sapiens
  source 1..22: mol_type = other DNA
agcttatcctgcatgctcatgg

SEQ ID NO: 5538 - DNA, 23 bp, Homo sapiens
  source 1..23: mol_type = other DNA
tactcatttatacatgctcactg

SEQ ID NO: 5539 - DNA, 22 bp, Homo sapiens
  source 1..22: mol_type = other DNA
taatatatctgcatgcccaagg

SEQ ID NO: 5540 - DNA, 22 bp, Homo sapiens
  source 1..22: mol_type = other DNA
agctcacttctgctgctcagag

SEQ ID NO: 5541 - DNA, 22 bp, Homo sapiens
  source 1..22: mol_type = other DNA
tcctcatctctccatctcaggg

SEQ ID NO: 5542 - DNA, 22 bp, Homo sapiens
  source 1..22: mol_type = other DNA
taattatcttgcatgttcaggg

SEQ ID NO: 5543 - DNA, 24 bp, Homo sapiens
  source 1..24: mol_type = other DNA
tactcaacactgcatgcatctcag

SEQ ID NO: 5544 - DNA, 22 bp, Homo sapiens
  source 1..22: mol_type = other DNA
ttaggaccctgcatgctcacgg

SEQ ID NO: 5545 - DNA, 22 bp, Homo sapiens
  source 1..22: mol_type = other DNA
cacaccctctgcatgcacttgg

SEQ ID NO: 5546 - DNA, 23 bp, Homo sapiens
  source 1..23: mol_type = other DNA
accacacctctgcaagctcctgg

SEQ ID NO: 5547 - DNA, 23 bp, Homo sapiens
  source 1..23: mol_type = other DNA
tgatggccactgcatgctctagg

SEQ ID NO: 5548 - DNA, 22 bp, Homo sapiens
  source 1..22: mol_type = other DNA
gtcccacctctgcatgcctggg

SEQ ID NO: 5549 - DNA, 22 bp, Homo sapiens
  source 1..22: mol_type = other DNA
ttctccactctgcatctcacag

SEQ ID NO: 5550 - DNA, 22 bp, Homo sapiens
  source 1..22: mol_type = other DNA
tactaaccctggatgcccaggg

SEQ ID NO: 5551 - DNA, 22 bp, Homo sapiens
  source 1..22: mol_type = other DNA
tactcacctctgctgcagtggt

SEQ ID NO: 5552 - DNA, 23 bp, Homo sapiens
  source 1..23: mol_type = other DNA
ctgtcacatctgcatgcacacag

SEQ ID NO: 5553 - DNA, 23 bp, Homo sapiens
  source 1..23: mol_type = other DNA
cccttacctctacatgctcagtc

SEQ ID NO: 5554 - DNA, 23 bp, Homo sapiens
  source 1..23: mol_type = other DNA
aactaaccacctcatgctcatgg

SEQ ID NO: 5555 - DNA, 22 bp, Homo sapiens
  source 1..22: mol_type = other DNA
cactcagtctgcatgcccttgg

SEQ ID NO: 5556 - DNA, 23 bp, Homo sapiens
  source 1..23: mol_type = other DNA
aactaatgcatgcatgctcatgg

SEQ ID NO: 5557 - DNA, 23 bp, Homo sapiens
  source 1..23: mol_type = other DNA
atcccacatatgcatgctcaaga

SEQ ID NO: 5558 - DNA, 23 bp, Homo sapiens
  source 1..23: mol_type = other DNA
cactgtcctatgcatgctctcag

SEQ ID NO: 5559 - DNA, 23 bp, Homo sapiens
  source 1..23: mol_type = other DNA
cactcacctcttccaactcaggg

SEQ ID NO: 5560 - DNA, 22 bp, Homo sapiens
  source 1..22: mol_type = other DNA
aactcacctggcatgcacacgt

SEQ ID NO: 5561 - DNA, 23 bp, Homo sapiens
  source 1..23: mol_type = other DNA
tacacacatcttcacgctcttgt

SEQ ID NO: 5562 - DNA, 23 bp, Homo sapiens
  source 1..23: mol_type = other DNA
taatcacctttgcatgctccgtg

SEQ ID NO: 5563 - DNA, 23 bp, Homo sapiens
  source 1..23: mol_type = other DNA
tgctcacctctgcctcccaaggt

SEQ ID NO: 5564 - DNA, 23 bp, Homo sapiens
  source 1..23: mol_type = other DNA
tactcacatgtacatgcacaaac

SEQ ID NO: 5565 - DNA, 21 bp, Homo sapiens
  source 1..21: mol_type = other DNA
gattcacctctgtgctcatgg

SEQ ID NO: 5566 - DNA, 23 bp, Homo sapiens
  source 1..23: mol_type = other DNA
tcatgagctatgcatgctcacag

SEQ ID NO: 5567 - DNA, 24 bp, Homo sapiens
  source 1..24: mol_type = other DNA
cactcacatctggcattctctggg

SEQ ID NO: 5568 - DNA, 22 bp, Homo sapiens
  source 1..22: mol_type = other DNA
taatcacctctgcatccctggt

SEQ ID NO: 5569 - DNA, 23 bp, Homo sapiens
  source 1..23: mol_type = other DNA
gactcactgctgcattctcagca

SEQ ID NO: 5570 - DNA, 23 bp, Homo sapiens
  source 1..23: mol_type = other DNA
ctctccccaccgcatgatcatgg

SEQ ID NO: 5571 - DNA, 22 bp, Homo sapiens
  source 1..22: mol_type = other DNA
cactcacagctgctgctctggg

SEQ ID NO: 5572 - DNA, 23 bp, Homo sapiens
  source 1..23: mol_type = other DNA
cattgacctctgcctgctcacct

SEQ ID NO: 5573 - DNA, 23 bp, Homo sapiens
  source 1..23: mol_type = other DNA
tactcaccgcaacatgattcagg

SEQ ID NO: 5574 - DNA, 23 bp, Homo sapiens
  source 1..23: mol_type = other DNA
cactcaccaatgcatgctgcatg

SEQ ID NO: 5575 - DNA, 23 bp, Homo sapiens
  source 1..23: mol_type = other DNA
cagtcacatatgtatgcttacgg

SEQ ID NO: 5576 - DNA, 24 bp, Homo sapiens
  source 1..24: mol_type = other DNA
taatcatcttctgcatgttcagag

SEQ ID NO: 5577 - DNA, 22 bp, Homo sapiens
  source 1..22: mol_type = other DNA
ttctacctctgcctgctcctgc

SEQ ID NO: 5578 - DNA, 22 bp, Homo sapiens
  source 1..22: mol_type = other DNA
tcttcacctctgcagctctaag

SEQ ID NO: 5579 - DNA, 22 bp, Homo sapiens
  source 1..22: mol_type = other DNA
aactcacctctgcgtctcaggc

SEQ ID NO: 5580 - DNA, 21 bp, Homo sapiens
  source 1..21: mol_type = other DNA
tactcaactgcattctcaggg

SEQ ID NO: 5581 - DNA, 22 bp, Homo sapiens
  source 1..22: mol_type = other DNA
cactcacactacatgctcttgg

SEQ ID NO: 5582 - DNA, 23 bp, Homo sapiens
  source 1..23: mol_type = other DNA
tacttacctctgcttgctcatag

SEQ ID NO: 5583 - DNA, 22 bp, Homo sapiens
  source 1..22: mol_type = other DNA
cactcattctgcatgcacaagg

SEQ ID NO: 5584 - DNA, 23 bp, Homo sapiens
  source 1..23: mol_type = other DNA
tactcatcctctcatgctaaggg

SEQ ID NO: 5585 - DNA, 22 bp, Homo sapiens
  source 1..22: mol_type = other DNA
tactcacctgacatactcagag

SEQ ID NO: 5586 - DNA, 23 bp, Homo sapiens
  source 1..23: mol_type = other DNA
tttgtacctctgcatgctcagat

SEQ ID NO: 5587 - DNA, 23 bp, Homo sapiens
  source 1..23: mol_type = other DNA
ttctcacctttgcatgccctggg

SEQ ID NO: 5588 - DNA, 22 bp, Homo sapiens
  source 1..22: mol_type = other DNA
tataacctctacatacacatgg

SEQ ID NO: 5589 - DNA, 22 bp, Homo sapiens
  source 1..22: mol_type = other DNA
tactccctctgaatgctctagg

SEQ ID NO: 5590 - DNA, 24 bp, Homo sapiens
  source 1..24: mol_type = other DNA
tactcacattctacatgtccaggg

SEQ ID NO: 5591 - DNA, 23 bp, Homo sapiens
  source 1..23: mol_type = other DNA
ctgtcacctctgcatgctgatag

SEQ ID NO: 5592 - DNA, 22 bp, Homo sapiens
  source 1..22: mol_type = other DNA
acatcacctctgcaggccaggg

SEQ ID NO: 5593 - DNA, 23 bp, Homo sapiens
  source 1..23: mol_type = other DNA
ttacaacctatgcatgatcaggg

SEQ ID NO: 5594 - DNA, 21 bp, Homo sapiens
  source 1..21: mol_type = other DNA
tgttcatctgtatgctcacgg

SEQ ID NO: 5595 - DNA, 23 bp, Homo sapiens
  source 1..23: mol_type = other DNA
ggcacacctctgcatgttcaata

SEQ ID NO: 5596 - DNA, 22 bp, Homo sapiens
  source 1..22: mol_type = other DNA
ttctcactcaacatgttcaggg

SEQ ID NO: 5597 - DNA, 24 bp, Homo sapiens
  source 1..24: mol_type = other DNA
cagacaccagctgcatgctcaagg

SEQ ID NO: 5598 - DNA, 22 bp, Homo sapiens
  source 1..22: mol_type = other DNA
cactccctctgaaggctccagg

SEQ ID NO: 5599 - DNA, 23 bp, Homo sapiens
  source 1..23: mol_type = other DNA
taggtgagtctgcatgctcaggg

SEQ ID NO: 5600 - DNA, 23 bp, Homo sapiens
  source 1..23: mol_type = other DNA
cactttcatctgcatactccagg

SEQ ID NO: 5601 - DNA, 22 bp, Homo sapiens
  source 1..22: mol_type = other DNA
tatttcctctggatgctcagag

SEQ ID NO: 5602 - DNA, 23 bp, Homo sapiens
  source 1..23: mol_type = other DNA
tactgcagactgcatactcaggg

SEQ ID NO: 5603 - DNA, 23 bp, Homo sapiens
  source 1..23: mol_type = other DNA
aactgacagctgaatgctcatga

SEQ ID NO: 5604 - DNA, 22 bp, Homo sapiens
  source 1..22: mol_type = other DNA
tactcacaccgcatgctcctgc

SEQ ID NO: 5605 - DNA, 22 bp, Homo sapiens
  source 1..22: mol_type = other DNA
taattacctagcatgctcaatg

SEQ ID NO: 5606 - DNA, 21 bp, Homo sapiens
  source 1..21: mol_type = other DNA
cactcacctgcatgctccccg

SEQ ID NO: 5607 - DNA, 23 bp, Homo sapiens
  source 1..23: mol_type = other DNA
tacacacatatgcatgctcacac

SEQ ID NO: 5608 - DNA, 23 bp, Homo sapiens
  source 1..23: mol_type = other DNA
tacttacctctcctagctctagg

SEQ ID NO: 5609 - DNA, 23 bp, Homo sapiens
  source 1..23: mol_type = other DNA
tcctcagctctgcaggagccagg

SEQ ID NO: 5610 - DNA, 23 bp, Homo sapiens
  source 1..23: mol_type = other DNA
ccctcacctctgcctgtcccggg

SEQ ID NO: 5611 - DNA, 23 bp, Homo sapiens
  source 1..23: mol_type = other DNA
tactcaccagtgcagtcccaggt

SEQ ID NO: 5612 - DNA, 23 bp, Homo sapiens
  source 1..23: mol_type = other DNA
tattatccttttcatgttcatgg

SEQ ID NO: 5613 - DNA, 23 bp, Homo sapiens
  source 1..23: mol_type = other DNA
tagtgacgtctgcttgttgaggg

SEQ ID NO: 5614 - DNA, 23 bp, Homo sapiens
  source 1..23: mol_type = other DNA
gactcacccttgcaggcttttgg

SEQ ID NO: 5615 - DNA, 23 bp, Homo sapiens
  source 1..23: mol_type = other DNA
tacacacctctacatgctcatga

SEQ ID NO: 5616 - DNA, 22 bp, Homo sapiens
  source 1..22: mol_type = other DNA
cactcactacacatgctcacgg

SEQ ID NO: 5617 - DNA, 22 bp, Homo sapiens
  source 1..22: mol_type = other DNA
aactcacgctgcatgcacatgg

SEQ ID NO: 5618 - DNA, 22 bp, Homo sapiens
  source 1..22: mol_type = other DNA
tagtcacctccgcatctctagg

SEQ ID NO: 5619 - DNA, 22 bp, Homo sapiens
  source 1..22: mol_type = other DNA
cgctcactctacatgcccacgg

SEQ ID NO: 5620 - DNA, 22 bp, Homo sapiens
  source 1..22: mol_type = other DNA
acctcacctctccatctctggg

SEQ ID NO: 5621 - DNA, 22 bp, Homo sapiens
  source 1..22: mol_type = other DNA
ttcacaccactgcatcccacgg

SEQ ID NO: 5622 - DNA, 23 bp, Homo sapiens
  source 1..23: mol_type = other DNA
gacacaccactgcaagctcaggg

SEQ ID NO: 5623 - DNA, 22 bp, Homo sapiens
  source 1..22: mol_type = other DNA
tactcaccctgtatgttcaatg

SEQ ID NO: 5624 - DNA, 22 bp, Homo sapiens
  source 1..22: mol_type = other DNA
taatcactccacatgctcgcgg

SEQ ID NO: 5625 - DNA, 23 bp, Homo sapiens
  source 1..23: mol_type = other DNA
acatcacccctgcattctcacgg

SEQ ID NO: 5626 - DNA, 23 bp, Homo sapiens
  source 1..23: mol_type = other DNA
atctatcccctgcatgctcatga

SEQ ID NO: 5627 - DNA, 22 bp, Homo sapiens
  source 1..22: mol_type = other DNA
cactcacccctccagctcaggg

SEQ ID NO: 5628 - DNA, 24 bp, Homo sapiens
  source 1..24: mol_type = other DNA
cactcactcactccatactcatgg

SEQ ID NO: 5629 - DNA, 23 bp, Homo sapiens
  source 1..23: mol_type = other DNA
accccaactctgcatgctctgag

SEQ ID NO: 5630 - DNA, 23 bp, Homo sapiens
  source 1..23: mol_type = other DNA
tgataacctctgcaagctcaaag

SEQ ID NO: 5631 - DNA, 22 bp, Homo sapiens
  source 1..22: mol_type = other DNA
cactccatctgcatgttcgtgg

SEQ ID NO: 5632 - DNA, 23 bp, Homo sapiens
  source 1..23: mol_type = other DNA
agtccacttctgcaggctcaggg

SEQ ID NO: 5633 - DNA, 23 bp, Homo sapiens
  source 1..23: mol_type = other DNA
atctcacctctccatgctcactg

SEQ ID NO: 5634 - DNA, 23 bp, Homo sapiens
  source 1..23: mol_type = other DNA
caggtacctctgcctgctccagg

SEQ ID NO: 5635 - DNA, 23 bp, Homo sapiens
  source 1..23: mol_type = other DNA
tgatcctctctgcatgctccatg

SEQ ID NO: 5636 - DNA, 22 bp, Homo sapiens
  source 1..22: mol_type = other DNA
aacacagctctgctgctcaggg

SEQ ID NO: 5637 - DNA, 23 bp, Homo sapiens
  source 1..23: mol_type = other DNA
tactcacctctgcatcctgagcc

SEQ ID NO: 5638 - DNA, 23 bp, Homo sapiens
  source 1..23: mol_type = other DNA
taaccacatctgcacactcactg

SEQ ID NO: 5639 - DNA, 23 bp, Homo sapiens
  source 1..23: mol_type = other DNA
tatccacatctgcatactccatg

SEQ ID NO: 5640 - DNA, 23 bp, Homo sapiens
  source 1..23: mol_type = other DNA
tactcatctctgcatggtctagt

SEQ ID NO: 5641 - DNA, 23 bp, Homo sapiens
  source 1..23: mol_type = other DNA
tcctctctactgtatggtcatgg

SEQ ID NO: 5642 - DNA, 22 bp, Homo sapiens
  source 1..22: mol_type = other DNA
ttttcactctgaatgctccagg

SEQ ID NO: 5643 - DNA, 22 bp, Homo sapiens
  source 1..22: mol_type = other DNA
gcctcacctcagcatcacacgg

SEQ ID NO: 5644 - DNA, 23 bp, Homo sapiens
  source 1..23: mol_type = other DNA
gacacatcttttcatgctcatgt

SEQ ID NO: 5645 - DNA, 25 bp, Homo sapiens
  source 1..25: mol_type = other DNA
tccacacctctcggcaagctgaggg

SEQ ID NO: 5646 - DNA, 23 bp, Homo sapiens
  source 1..23: mol_type = other DNA
tatatacctctgcatgttcagag

SEQ ID NO: 5647 - DNA, 23 bp, Homo sapiens
  source 1..23: mol_type = other DNA
tactcacctctgcatccctaggc

SEQ ID NO: 5648 - DNA, 22 bp, Homo sapiens
  source 1..22: mol_type = other DNA
tactccctctgcatactaatgg

SEQ ID NO: 5649 - DNA, 23 bp, Homo sapiens
  source 1..23: mol_type = other DNA
atctcatctctgcatgctctagg

SEQ ID NO: 5650 - DNA, 23 bp, Homo sapiens
  source 1..23: mol_type = other DNA
ggctcacccctgcatgctcgagg

SEQ ID NO: 5651 - DNA, 22 bp, Homo sapiens
  source 1..22: mol_type = other DNA
tacacacatcccatgctcatgg

SEQ ID NO: 5652 - DNA, 22 bp, Homo sapiens
  source 1..22: mol_type = other DNA
ttctatatctgcatgctcacga

SEQ ID NO: 5653 - DNA, 22 bp, Homo sapiens
  source 1..22: mol_type = other DNA
tactcactcagcatgcccctgg

SEQ ID NO: 5654 - DNA, 22 bp, Homo sapiens
  source 1..22: mol_type = other DNA
tactctctctgcatacacagag

SEQ ID NO: 5655 - DNA, 23 bp, Homo sapiens
  source 1..23: mol_type = other DNA
atgtaacctctgcatgctcagaa

SEQ ID NO: 5656 - DNA, 23 bp, Homo sapiens
  source 1..23: mol_type = other DNA
acaccacctatgcatgcttatgg

SEQ ID NO: 5657 - DNA, 23 bp, Homo sapiens
  source 1..23: mol_type = other DNA
cattcacatatgcatgctcatgg

SEQ ID NO: 5658 - DNA, 23 bp, Homo sapiens
  source 1..23: mol_type = other DNA
cactcacctctccatgctaaggt

SEQ ID NO: 5659 - DNA, 22 bp, Homo sapiens
  source 1..22: mol_type = other DNA
tgttcacactgcatgctctggg

SEQ ID NO: 5660 - DNA, 23 bp, Homo sapiens
  source 1..23: mol_type = other DNA
tactaacctttgcatgcacacag

SEQ ID NO: 5661 - DNA, 22 bp, Homo sapiens
  source 1..22: mol_type = other DNA
tactcccctaacatgctcttgg

SEQ ID NO: 5662 - DNA, 22 bp, Homo sapiens
  source 1..22: mol_type = other DNA
ctctcactctgcatgcacacag

SEQ ID NO: 5663 - DNA, 22 bp, Homo sapiens
  source 1..22: mol_type = other DNA
ttgctaccttgcatgctcatgg

SEQ ID NO: 5664 - DNA, 22 bp, Homo sapiens
  source 1..22: mol_type = other DNA
cactacctctgcaggctctagg

SEQ ID NO: 5665 - DNA, 22 bp, Homo sapiens
  source 1..22: mol_type = other DNA
ttgtcacctctgcagctcacag

SEQ ID NO: 5666 - DNA, 22 bp, Homo sapiens
  source 1..22: mol_type = other DNA
atctcactctacttgctcaggg

SEQ ID NO: 5667 - DNA, 22 bp, Homo sapiens
  source 1..22: mol_type = other DNA
tcctcctatctgcatgtcaagg

SEQ ID NO: 5668 - DNA, 22 bp, Homo sapiens
  source 1..22: mol_type = other DNA
tatatccctctgatgctcaggg

SEQ ID NO: 5669 - DNA, 21 bp, Homo sapiens
  source 1..21: mol_type = other DNA
cactcacatgcatgctcaaag

SEQ ID NO: 5670 - DNA, 23 bp, Homo sapiens
  source 1..23: mol_type = other DNA
ctcttacctctaaatgctcagag

SEQ ID NO: 5671 - DNA, 22 bp, Homo sapiens
  source 1..22: mol_type = other DNA
tgcacatatctcatgctcaagg

SEQ ID NO: 5672 - DNA, 23 bp, Homo sapiens
  source 1..23: mol_type = other DNA
tactcacttctgtatgcccagtg

SEQ ID NO: 5673 - DNA, 22 bp, Homo sapiens
  source 1..22: mol_type = other DNA
gagtcacccctgcatgtcaggg

SEQ ID NO: 5674 - DNA, 23 bp, Homo sapiens
  source 1..23: mol_type = other DNA
tgattccctatgcatgcccatgg

SEQ ID NO: 5675 - DNA, 23 bp, Homo sapiens
  source 1..23: mol_type = other DNA
caccccccactgcatgctcaggg

SEQ ID NO: 5676 - DNA, 21 bp, Homo sapiens
  source 1..21: mol_type = other DNA
tcctcacctgcatactcagag

SEQ ID NO: 5677 - DNA, 23 bp, Homo sapiens
  source 1..23: mol_type = other DNA
tcctcacctctacatgttccggc

SEQ ID NO: 5678 - DNA, 22 bp, Homo sapiens
  source 1..22: mol_type = other DNA
gaaacacatctcatgctcaggg

SEQ ID NO: 5679 - DNA, 23 bp, Homo sapiens
  source 1..23: mol_type = other DNA
tcttcactactgcatgcacctgg

SEQ ID NO: 5680 - DNA, 24 bp, Homo sapiens
  source 1..24: mol_type = other DNA
ctctcagcctctgcatgctctgag

SEQ ID NO: 5681 - DNA, 23 bp, Homo sapiens
  source 1..23: mol_type = other DNA
ccccaacctctgcatgctcagaa

SEQ ID NO: 5682 - DNA, 22 bp, Homo sapiens
  source 1..22: mol_type = other DNA
tacttgcactgcatgctcactg

SEQ ID NO: 5683 - DNA, 23 bp, Homo sapiens
  source 1..23: mol_type = other DNA
gagtcacacctgcatgctcatag

SEQ ID NO: 5684 - DNA, 24 bp, Homo sapiens
  source 1..24: mol_type = other DNA
ttctcttctactgcatgctcaggc

SEQ ID NO: 5685 - DNA, 22 bp, Homo sapiens
  source 1..22: mol_type = other DNA
gaaacgcctctcatgctcatgg

SEQ ID NO: 5686 - DNA, 23 bp, Homo sapiens
  source 1..23: mol_type = other DNA
gcctcataacagcatgctcatgg

SEQ ID NO: 5687 - DNA, 23 bp, Homo sapiens
  source 1..23: mol_type = other DNA
tattcacttctgcatgcccagtg

SEQ ID NO: 5688 - DNA, 22 bp, Homo sapiens
  source 1..22: mol_type = other DNA
ctctcactctgcatgctaatga

SEQ ID NO: 5689 - DNA, 23 bp, Homo sapiens
  source 1..23: mol_type = other DNA
tattcacctctgcattaccaggg

SEQ ID NO: 5690 - DNA, 22 bp, Homo sapiens
  source 1..22: mol_type = other DNA
ttatccctttgcatgctcatag

SEQ ID NO: 5691 - DNA, 23 bp, Homo sapiens
  source 1..23: mol_type = other DNA
cactcacacatgcatgcacacag

SEQ ID NO: 5692 - DNA, 23 bp, Homo sapiens
  source 1..23: mol_type = other DNA
tgttcagttatgcatgctcacag

SEQ ID NO: 5693 - DNA, 23 bp, Homo sapiens
  source 1..23: mol_type = other DNA
tatgcatctctgtatgctcaaag

SEQ ID NO: 5694 - DNA, 23 bp, Homo sapiens
  source 1..23: mol_type = other DNA
tcccattctctgcatgcttaagg

SEQ ID NO: 5695 - DNA, 24 bp, Homo sapiens
  source 1..24: mol_type = other DNA
cctgcacctctgacatgctcaggg

SEQ ID NO: 5696 - DNA, 23 bp, Homo sapiens
  source 1..23: mol_type = other DNA
tccccacccccacatgcccaggg

SEQ ID NO: 5697 - DNA, 23 bp, Homo sapiens
  source 1..23: mol_type = other DNA
caatcaccccagtatgctcagag

SEQ ID NO: 5698 - DNA, 22 bp, Homo sapiens
  source 1..22: mol_type = other DNA
cactgcctatgtatgctcaagg

SEQ ID NO: 5699 - DNA, 23 bp, Homo sapiens
  source 1..23: mol_type = other DNA
tccttcccactccatgctccagg

SEQ ID NO: 5700 - DNA, 22 bp, Homo sapiens
  source 1..22: mol_type = other DNA
aactacctcggcttgctcaaag

SEQ ID NO: 5701 - DNA, 22 bp, Homo sapiens
  source 1..22: mol_type = other DNA
tactcacccgacatggtcagtg

SEQ ID NO: 5702 - DNA, 23 bp, Homo sapiens
  source 1..23: mol_type = other DNA
tcctcatctctgtatgctcagga

SEQ ID NO: 5703 - DNA, 23 bp, Homo sapiens
  source 1..23: mol_type = other DNA
ttgtaacatctgcatgcttatga

SEQ ID NO: 5704 - DNA, 23 bp, Homo sapiens
  source 1..23: mol_type = other DNA
tcatcacatgtgtatgctcatgg

SEQ ID NO: 5705 - DNA, 22 bp, Homo sapiens
  source 1..22: mol_type = other DNA
taccacgtttgcaggctcacag

SEQ ID NO: 5706 - DNA, 23 bp, Homo sapiens
  source 1..23: mol_type = other DNA
tactcatctctgcatgagcagtt

SEQ ID NO: 5707 - DNA, 22 bp, Homo sapiens
  source 1..22: mol_type = other DNA
cactcatctctgcaactcatgg

SEQ ID NO: 5708 - DNA, 22 bp, Homo sapiens
  source 1..22: mol_type = other DNA
cactcatctcctcatctcaagg

SEQ ID NO: 5709 - DNA, 23 bp, Homo sapiens
  source 1..23: mol_type = other DNA
cactcatctagacatgctcaagg

SEQ ID NO: 5710 - DNA, 22 bp, Homo sapiens
  source 1..22: mol_type = other DNA
tactccctttgcaagctcccag

SEQ ID NO: 5711 - DNA, 23 bp, Homo sapiens
  source 1..23: mol_type = other DNA
ttctcaaacctgcatgcacattg

SEQ ID NO: 5712 - DNA, 21 bp, Homo sapiens
  source 1..21: mol_type = other DNA
taatcctctgcatgttcaagc

SEQ ID NO: 5713 - DNA, 23 bp, Homo sapiens
  source 1..23: mol_type = other DNA
tattcaactcagcatgttcactg

SEQ ID NO: 5714 - DNA, 23 bp, Homo sapiens
  source 1..23: mol_type = other DNA
gactcaccactgcacgttaagag

SEQ ID NO: 5715 - DNA, 21 bp, Homo sapiens
  source 1..21: mol_type = other DNA
tacccacccctgcatgaatgg

SEQ ID NO: 5716 - DNA, 23 bp, Homo sapiens
  source 1..23: mol_type = other DNA
ctctcacctctgcctcctcagta

SEQ ID NO: 5717 - DNA, 23 bp, Homo sapiens
  source 1..23: mol_type = other DNA
gactcacccctccatggtcatgc

SEQ ID NO: 5718 - DNA, 22 bp, Homo sapiens
  source 1..22: mol_type = other DNA
tcctcacaacccatgctcaggg

SEQ ID NO: 5719 - DNA, 22 bp, Homo sapiens
  source 1..22: mol_type = other DNA
tcctgacctctcaggctcaagc

SEQ ID NO: 5720 - DNA, 22 bp, Homo sapiens
  source 1..22: mol_type = other DNA
tacccaccactgcagccaaggg

SEQ ID NO: 5721 - DNA, 22 bp, Homo sapiens
  source 1..22: mol_type = other DNA
ttctacctctagatgttcaggg

SEQ ID NO: 5722 - DNA, 22 bp, Homo sapiens
  source 1..22: mol_type = other DNA
tgctctcactgcatgcccaggg

SEQ ID NO: 5723 - DNA, 23 bp, Homo sapiens
  source 1..23: mol_type = other DNA
taataagctctgcatgcccatct

SEQ ID NO: 5724 - DNA, 23 bp, Homo sapiens
  source 1..23: mol_type = other DNA
ttatcacctctctatgctcagaa

SEQ ID NO: 5725 - DNA, 23 bp, Homo sapiens
  source 1..23: mol_type = other DNA
tacttaccactgcattgtcttgg

SEQ ID NO: 5726 - DNA, 23 bp, Homo sapiens
  source 1..23: mol_type = other DNA
ttctcacctctgcatcccaagta

SEQ ID NO: 5727 - DNA, 23 bp, Homo sapiens
  source 1..23: mol_type = other DNA
tactcactcctccatgattatgt

SEQ ID NO: 5728 - DNA, 22 bp, Homo sapiens
  source 1..22: mol_type = other DNA
tactcacttcttcatctctagc

SEQ ID NO: 5729 - DNA, 23 bp, Homo sapiens
  source 1..23: mol_type = other DNA
tacttacctctgaatcctcagaa

SEQ ID NO: 5730 - DNA, 23 bp, Homo sapiens
  source 1..23: mol_type = other DNA
ttatgacctctacctgctctggg

SEQ ID NO: 5731 - DNA, 23 bp, Homo sapiens
  source 1..23: mol_type = other DNA
tactcatctctgcatgtgggtgt

SEQ ID NO: 5732 - DNA, 23 bp, Homo sapiens
  source 1..23: mol_type = other DNA
tactcacctttgcatgaaagtgg

SEQ ID NO: 5733 - DNA, 23 bp, Homo sapiens
  source 1..23: mol_type = other DNA
tactaacgtttgcatgcaaattg

SEQ ID NO: 5734 - DNA, 23 bp, Homo sapiens
  source 1..23: mol_type = other DNA
gtctcacctttgcatctacaagg

SEQ ID NO: 5735 - DNA, 23 bp, Homo sapiens
  source 1..23: mol_type = other DNA
aactctcctatgcattctcagct

SEQ ID NO: 5736 - DNA, 22 bp, Homo sapiens
  source 1..22: mol_type = other DNA
tactcaactctgctgccatggg

SEQ ID NO: 5737 - DNA, 21 bp, Homo sapiens
  source 1..21: mol_type = other DNA
ttcttaactctgcattcaagg

SEQ ID NO: 5738 - DNA, 22 bp, Homo sapiens
  source 1..22: mol_type = other DNA
tacttactctgcaagataaggg

SEQ ID NO: 5739 - DNA, 23 bp, Homo sapiens
  source 1..23: mol_type = other DNA
tacataacactgcatgttcatgg

SEQ ID NO: 5740 - DNA, 23 bp, Homo sapiens
  source 1..23: mol_type = other DNA
tggtcacctctacaagcacaggg

SEQ ID NO: 5741 - DNA, 23 bp, Homo sapiens
  source 1..23: mol_type = other DNA
tagacacataagcatgctcacag

SEQ ID NO: 5742 - DNA, 22 bp, Homo sapiens
  source 1..22: mol_type = other DNA
tactcacctcccatgcacaggc

SEQ ID NO: 5743 - DNA, 22 bp, Homo sapiens
  source 1..22: mol_type = other DNA
tagtgttctctgcatgccaggg

SEQ ID NO: 5744 - DNA, 23 bp, Homo sapiens
  source 1..23: mol_type = other DNA
gactcacctctgcacacctaggc

SEQ ID NO: 5745 - DNA, 23 bp, Homo sapiens
  source 1..23: mol_type = other DNA
tgctgacctcagccagcttaagg

SEQ ID NO: 5746 - RNA, 4929 nt, synthetic construct
  misc_feature 1..4929: note = Description of Artificial Sequence: Synthetic polynucleotide
  source 1..4929: mol_type = other RNA
atgagcgaggtggagttcagccacgagtactggatgcggcacgccctgaccctggccaagcgggcccgggacgagcgggaggtgcccgtgggcgccgtgctggtgctgaacaaccgggtgatcggcgagggctggaaccgggccatcggcctgcacgaccccaccgcccacgccgagatcatggccctgcggcagggcggcctggtgatgcagaactaccggctgatcgacgccaccctgtacgtgaccttcgagccctgcgtgatgtgcgccggcgccatgatccacagccggatcggccgggtggtgttcggcgtgcggaacgccaagaccggcgccgccggcagcctgatggacgtgctgcaccaccccggcatgaaccaccgggtggagatcaccgagggcatcctggccgacgagtgcgccgccctgctgtgccggttcttccggatgccccggcgggtgttcaacgcccagaagaaggcccagagcagcaccgacaggaaataagagagaaaagaagagtaagaagaaatataagagccaccagcggcggcagcagcggcggcagcagcggcagcgagacacccggcaccagcgagagcgccacccccgagagcagcggcggcagcagcggcggcagcgacaagaagtacagcatcggcctggccatcggcaccaacagcgtgggctgggccgtgatcaccgacgagtacaaggtgcccagcaagaagttcaaggtgctgggcaacaccgaccggcacagcatcaagaagaacctgatcggcgccctgctgttcgacagcggcgagacagccgaggccacccggctgaagcggaccgcccggcggcggtacacccggcggaagaaccggatctgctacctgcaggagatcttcagcaacgagatggccaaggtggacgacagcttcttccaccggctggaggagagcttcctggtggaggaggacaagaagcacgagcggcaccccatcttcggcaacatcgtggacgaggtggcctaccacgagaagtaccccaccatctaccacctgcggaagaagctggtggacagcaccgacaaggccgacctgcggctgatctacctggccctggcccacatgatcaagttccggggccacttcctgatcgagggcgacctgaaccccgacaacagcgacgtggacaagctgttcatccagctggtgcagacctacaaccagctgttcgaggagaaccccatcaacgccagcggcgtggacgccaaggccatcctgagcgcccggctgagcaagagccggcggctggagaacctgatcgcccagctgcccggcgagaagaagaacggcctgttcggcaacctgatcgccctgagcctgggcctgacccccaacttcaagagcaacttcgacctggccgaggacgccaagctgcagctgagcaaggacacctacgacgacgacctggacaacctgctggcccagatcggcgaccagtacgccgacctgttcctggccgccaagaacctgagcgacgccatcctgctgagcgacatcctgcgggtgaacaccgagatcaccaaggcccccctgagcgccagcatgatcaagcggtacgacgagcaccaccaggacctgaccctgctgaaggccctggtgcggcagcagctgcccgagaagtacaaggagatcttcttcgaccagagcaagaacggctacgccggctacatcgacggcggcgccagccaggaggagttctacaagttcatcaagcccatcctggagaagatggacggcaccgaggagctgctggtgaagctgaaccgggaggacctgctgcggaagcagcggaccttcgacaacggcagcatcccccaccagatccacctgggcgagctgcacgccatcctgcggcggcaggaggacttctaccccttcctgaaggacaaccgggagaagatcgagaagatcctgaccttccggatcccctactacgtgggccccctggcccggggcaacagccggttcgcctggatgacccgcaagagcgaggagacaatcaccccctggaacttcgaggaggtggtggacaagggcgccagcgcccagagcttcatcgagcggatgaccaacttcgacaagaacctgcccaacgagaaggtgctgcccaagcacagcctgctgtacgagtacttcaccgtgtacaacgagctgaccaaggtgaagtacgtgaccgagggcatgcggaagcccgccttcctgagcggcgagcagaagaaggccatcgtggacctgctgttcaagaccaaccggaaggtgaccgtgaagcagctgaaggaggactacttcaagaagatcgagtgcttcgacagcgtggagatcagcggcgtggaggaccggttcaacgccagcctgggcacctaccacgacctgctgaagatcatcaaggacaaggacttcctggacaacgaggagaacgaggacatcctggaggacatcgtgctgaccctgaccctgttcgaggaccgggagatgatcgaggagcggctgaagacctacgcccacctgttcgacgacaaggtgatgaagcagctgaagcggcggcggtacaccggctggggccggctgagccggaagctgatcaacggcatccgggacaagcagagcggcaagaccatcctggacttcctcaagagcgacggcttcgccaaccggaacttcatgcagctgatccacgacgacagcctgaccttcaaggaggacatccagaaggcccaggtgagcggccagggcgacagcctgcacgagcacatcgccaacctggccggcagccccgccatcaagaagggcatcctgcagaccgtgaaggtggtggacgagctggtgaaggtgatgggccggcacaagcccgagaacatcgtgatcgagatggcccgggagaaccagaccacccagaagggccagaagaacagccgggagcggatgaagcggatcgaggagggcatcaaggagctgggcagccagatcctgaaggagcaccccgtggagaacacccagctgcagaacgagaagctgtacctgtactacctgcagaacggccgggacatgtacgtggaccaggagctggacatcaaccggctgagcgactacgacgtggaccacatcgtgccccagagcttcctgaaggacgacagcatcgacaacaaggtgctgacccggagcgacaagaaccggggcaagagcgacaacgtgcccagcgaggaggtggtgaagaagatgaagaactactggcggcagctgctgaacgccaagctgatcacccagcggaagttcgacaacctgaccaaggccgagcggggcggcctgagcgagctggacaaggccggcttcatcaagcggcagctggtggagacacggcagatcaccaagcacgtggcccagatcctggacagccggatgaacaccaagtacgacgagaacgacaagctgatccgggaggtgaaggtgatcaccctcaagagcaagctggtgagcgacttccggaaggacttccagttctacaaggtgcgggagatcaacaactaccaccacgcccacgacgcctacctgaacgccgtggtgggcaccgccctgatcaagaagtaccccaagctggagagcgagttcgtgtacggcgactacaaggtgtacgacgtgcggaagatgatcgccaagagcgagcaggagatcggcaaggccaccgccaagtacttcttctacagcaacatcatgaacttcttcaagaccgagatcaccctggccaacggcgagatccggaagcggcccctgatcgagacaaacggcgagacaggcgagatcgtgtgggacaagggccgggacttcgccaccgtgcggaaggtgctgagcatgccccaggtgaacatcgtgaagaagaccgaggtgcagaccggcggcttcagcaaggagagcatcctgcccaagcggaacagcgacaagctgatcgcccggaagaaggactgggaccccaagaagtacggcggcttcgacagccccaccgtggcctacagcgtgctggtggtggccaaggtggagaagggcaagagcaagaagctcaagagcgtgaaggagctgctgggcatcaccatcatggagcggagcagcttcgagaagaaccccatcgacttcctggaggccaagggctacaaggaggtgaagaaggacctgatcatcaagctgcccaagtacagcctgttcgagctggagaacggccggaagcggatgctggccagcgccggcgagctgcagaagggcaacgagctggccctgcccagcaagtacgtgaacttcctgtacctggccagccactacgagaagctgaagggcagccccgaggacaacgagcagaagcagctgttcgtggagcagcacaagcactacctggacgagatcatcgagcagatcagcgagttcagcaagcgggtgatcctggccgacgccaacctggacaaggtgctgagcgcctacaacaagcaccgggacaagcccatccgggagcaggccgagaacatcatccacctgttcaccctgaccaacctgggcgcccccgccgccttcaagtacttcgacaccaccatcgaccggaagcggtacaccagcaccaaggaggtgctggacgccaccctgatccaccagagcatcaccggcctgtacgagacacggatcgacctgagccagctgggcggcgacgagggcgccgacaagcggaccgccgacggcagcgagttcgagagccccaagaagaagcggaaggtgtgagcggccgcttaattaagctgccttctgcggggcttgccttctggccatgcccttcttctctcccttgcacctgtacctcttggtctttgaataaagcctgagtaggaagtctaga

SEQ ID NO: 5747 - protein, 1588 aa, synthetic construct
  REGION 1..1588: note = Description of Artificial Sequence: Synthetic polypeptide
MSEVEFSHEYWMRHALTLAKRARDEREVPVGAVLVLNNRVIGEGWNRAIGLHDPTAHAEIMALRQGGLVMQNYRLIDATLYVTFEPCVMCAGAMIHSRIGRVVFGVRNAKTGAAGSLMDVLHHPGMNHRVEITEGILADECAALLCRFFRMPRRVFNAQKKAQSSTDSGGSSGGSSGSETPGTSESATPESSGGSSGGSDKKYSIGLAIGTNSVGWAVITDEYKVPSKKFKVLGNTDRHSIKKNLIGALLFDSGETAEATRLKRTARRRYTRRKNRICYLQEIFSNEMAKVDDSFFHRLEESFLVEEDKKHERHPIFGNIVDEVAYHEKYPTIYHLRKKLVDSTDKADLRLIYLALAHMIKFRGHFLIEGDLNPDNSDVDKLFIQLVQTYNQLFEENPINASGVDAKAILSARLSKSRRLENLIAQLPGEKKNGLFGNLIALSLGLTPNFKSNFDLAEDAKLQLSKDTYDDDLDNLLAQIGDQYADLFLAAKNLSDAILLSDILRVNTEITKAPLSASMIKRYDEHHQDLTLLKALVRQQLPEKYKEIFFDQSKNGYAGYIDGGASQEEFYKFIKPILEKMDGTEELLVKLNREDLLRKQRTFDNGSIPHQIHLGELHAILRRQEDFYPFLKDNREKIEKILTFRIPYYVGPLARGNSRFAWMTRKSEETITPWNFEEVVDKGASAQSFIERMTNFDKNLPNEKVLPKHSLLYEYFTVYNELTKVKYVTEGMRKPAFLSGEQKKAIVDLLFKTNRKVTVKQLKEDYFKKIECFDSVEISGVEDRFNASLGTYHDLLKIIKDKDFLDNEENEDILEDIVLTLTLFEDREMIEERLKTYAHLFDDKVMKQLKRRRYTGWGRLSRKLINGIRDKQSGKTILDFLKSDGFANRNFMQLIHDDSLTFKEDIQKAQVSGQGDSLHEHIANLAGSPAIKKGILQTVKVVDELVKVMGRHKPENIVIEMARENQTTQKGQKNSRERMKRIEEGIKELGSQILKEHPVENTQLQNEKLYLYYLQNGRDMYVDQELDINRLSDYDVDHIVPQSFLKDDSIDNKVLTRSDKNRGKSDNVPSEEVVKKMKNYWRQLLNAKLITQRKFDNLTKAERGGLSELDKAGFIKRQLVETRQITKHVAQILDSRMNTKYDENDKLIREVKVITLKSKLVSDFRKDFQFYKVREINNYHHAHDAYLNAVVGTALIKKYPKLESEFVYGDYKVYDVRKMIAKSEQEIGKATAKYFFYSNIMNFFKTEITLANGEIRKRPLIETNGETGEIVWDKGRDFATVRKVLSMPQVNIVKKTEVQTGGFSKESILPKRNSDKLIARKKDWDPKKYGGFDSPTVAYSVLVVAKVEKGKSKKLKSVKELLGITIMERSSFEKNPIDFLEAKGYKEVKKDLIIKLPKYSLFELENGRKRMLASAGELQKGNELALPSKYVNFLYLASHYEKLKGSPEDNEQKQLFVEQHKHYLDEIIEQISEFSKRVILADANLDKVLSAYNKHRDKPIREQAENIIHLFTLTNLGAPAAFKYFDTTIDRKRYTSTKEVLDATLIHQSITGLYETRIDLSQLGGDEGADKRTADGSEFESPKKKRKV

SEQ ID NO: 5748 - RNA, 47 nt, synthetic construct
  misc_feature 1..47: note = Description of Artificial Sequence: Synthetic oligonucleotide
  source 1..47: mol_type = other RNA
aggaaataagagagaaaagaagagtaagaagaaatataagagccacc

SEQ ID NO: 5749 - RNA, 501 nt, synthetic construct
  misc_feature 1..501: note = Description of Artificial Sequence: Synthetic polynucleotide
  source 1..501: mol_type = other RNA
atgagcgaggtggagttcagccacgagtactggatgcggcacgccctgaccctggccaagcgggcccgggacgagcgggaggtgcccgtgggcgccgtgctggtgctgaacaaccgggtgatcggcgagggctggaaccgggccatcggcctgcacgaccccaccgcccacgccgagatcatggccctgcggcagggcggcctggtgatgcagaactaccggctgatcgacgccaccctgtacgtgaccttcgagccctgcgtgatgtgcgccggcgccatgatccacagccggatcggccgggtggtgttcggcgtgcggaacgccaagaccggcgccgccggcagcctgatggacgtgctgcaccaccccggcatgaaccaccgggtggagatcaccgagggcatcctggccgacgagtgcgccgccctgctgtgccggttcttccggatgccccggcgggtgttcaacgcccagaagaaggcccagagcagcaccgac

SEQ ID NO: 5750 - protein, 167 aa, synthetic construct
  REGION 1..167: note = Description of Artificial Sequence: Synthetic polypeptide
MSEVEFSHEYWMRHALTLAKRARDEREVPVGAVLVLNNRVIGEGWNRAIGLHDPTAHAEIMALRQGGLVMQNYRLIDATLYVTFEPCVMCAGAMIHSRIGRVVFGVRNAKTGAAGSLMDVLHHPGMNHRVEITEGILADECAALLCRFFRMPRRVFNAQKKAQSSTD

SEQ ID NO: 5751 - RNA, 96 nt, synthetic construct
  misc_feature 1..96: note = Description of Artificial Sequence: Synthetic oligonucleotide
  source 1..96: mol_type = other RNA
agcggcggcagcagcggcggcagcagcggcagcgagacacccggcaccagcgagagcgccacccccgagagcagcggcggcagcagcggcggcagc

SEQ ID NO: 5752 - protein, 32 aa, synthetic construct
  REGION 1..32: note = Description of Artificial Sequence: Synthetic polypeptide
SGGSSGGSSGSETPGTSESATPESSGGSSGGS

SEQ ID NO: 5753 - RNA, 4101 nt, synthetic construct
  misc_feature 1..4101: note = Description of Artificial Sequence: Synthetic polynucleotide
  source 1..4101: mol_type = other RNA
gacaagaagtacagcatcggcctggccatcggcaccaacagcgtgggctgggccgtgatcaccgacgagtacaaggtgcccagcaagaagttcaaggtgctgggcaacaccgaccggcacagcatcaagaagaacctgatcggcgccctgctgttcgacagcggcgagacagccgaggccacccggctgaagcggaccgcccggcggcggtacacccggcggaagaaccggatctgctacctgcaggagatcttcagcaacgagatggccaaggtggacgacagcttcttccaccggctggaggagagcttcctggtggaggaggacaagaagcacgagcggcaccccatcttcggcaacatcgtggacgaggtggcctaccacgagaagtaccccaccatctaccacctgcggaagaagctggtggacagcaccgacaaggccgacctgcggctgatctacctggccctggcccacatgatcaagttccggggccacttcctgatcgagggcgacctgaaccccgacaacagcgacgtggacaagctgttcatccagctggtgcagacctacaaccagctgttcgaggagaaccccatcaacgccagcggcgtggacgccaaggccatcctgagcgcccggctgagcaagagccggcggctggagaacctgatcgcccagctgcccggcgagaagaagaacggcctgttcggcaacctgatcgccctgagcctgggcctgacccccaacttcaagagcaacttcgacctggccgaggacgccaagctgcagctgagcaaggacacctacgacgacgacctggacaacctgctggcccagatcggcgaccagtacgccgacctgttcctggccgccaagaacctgagcgacgccatcctgctgagcgacatcctgcgggtgaacaccgagatcaccaaggcccccctgagcgccagcatgatcaagcggtacgacgagcaccaccaggacctgaccctgctgaaggccctggtgcggcagcagctgcccgagaagtacaaggagatcttcttcgaccagagcaagaacggctacgccggctacatcgacggcggcgccagccaggaggagttctacaagttcatcaagcccatcctggagaagatggacggcaccgaggagctgctggtgaagctgaaccgggaggacctgctgcggaagcagcggaccttcgacaacggcagcatcccccaccagatccacctgggcgagctgcacgccatcctgcggcggcaggaggacttctaccccttcctgaaggacaaccgggagaagatcgagaagatcctgaccttccggatcccctactacgtgggccccctggcccggggcaacagccggttcgcctggatgacccgcaagagcgaggagacaatcaccccctggaacttcgaggaggtggtggacaagggcgccagcgcccagagcttcatcgagcggatgaccaacttcgacaagaacctgcccaacgagaaggtgctgcccaagcacagcctgctgtacgagtacttcaccgtgtacaacgagctgaccaaggtgaagtacgtgaccgagggcatgcggaagcccgccttcctgagcggcgagcagaagaaggccatcgtggacctgctgttcaagaccaaccggaaggtgaccgtgaagcagctgaaggaggactacttcaagaagatcgagtgcttcgacagcgtggagatcagcggcgtggaggaccggttcaacgccagcctgggcacctaccacgacctgctgaagatcatcaaggacaaggacttcctggacaacgaggagaacgaggacatcctggaggacatcgtgctgaccctgaccctgttcgaggaccgggagatgatcgaggagcggctgaagacctacgcccacctgttcgacgacaaggtgatgaagcagctgaagcggcggcggtacaccggctggggccggctgagccggaagctgatcaacggcatccgggacaagcagagcggcaagaccatcctggacttcctcaagagcgacggcttcgccaaccggaacttcatgcagctgatccacgacgacagcctgaccttcaaggaggacatccagaaggcccaggtgagcggccagggcgacagcctgcacgagcacatcgccaacctggccggcagccccgccatcaagaagggcatcctgcagaccgtgaaggtggtggacgagctggtgaaggtgatgggccggcacaagcccgagaacatcgtgatcgagatggcccgggagaaccagaccacccagaagggccagaagaacagccgggagcggatgaagcggatcgaggagggcatcaaggagctgggcagccagatcctgaaggagcaccccgtggagaacacccagctgcagaacgagaagctgtacctgtactacctgcagaacggccgggacatgtacgtggaccaggagctggacatcaaccggctgagcgactacgacgtggaccacatcgtgccccagagcttcctgaaggacgacagcatcgacaacaaggtgctgacccggagcgacaagaaccggggcaagagcgacaacgtgcccagcgaggaggtggtgaagaagatgaagaactactggcggcagctgctgaacgccaagctgatcacccagcggaagttcgacaacctgaccaaggccgagcggggcggcctgagcgagctggacaaggccggcttcatcaagcggcagctggtggagacacggcagatcaccaagcacgtggcccagatcctggacagccggatgaacaccaagtacgacgagaacgacaagctgatccgggaggtgaaggtgatcaccctcaagagcaagctggtgagcgacttccggaaggacttccagttctacaaggtgcgggagatcaacaactaccaccacgcccacgacgcctacctgaacgccgtggtgggcaccgccctgatcaagaagtaccccaagctggagagcgagttcgtgtacggcgactacaaggtgtacgacgtgcggaagatgatcgccaagagcgagcaggagatcggcaaggccaccgccaagtacttcttctacagcaacatcatgaacttcttcaagaccgagatcaccctggccaacggcgagatccggaagcggcccctgatcgagacaaacggcgagacaggcgagatcgtgtgggacaagggccgggacttcgccaccgtgcggaaggtgctgagcatgccccaggtgaacatcgtgaagaagaccgaggtgcagaccggcggcttcagcaaggagagcatcctgcccaagcggaacagcgacaagctgatcgcccggaagaaggactgggaccccaagaagtacggcggcttcgacagccccaccgtggcctacagcgtgctggtggtggccaaggtggagaagggcaagagcaagaagctcaagagcgtgaaggagctgctgggcatcaccatcatggagcggagcagcttcgagaagaaccccatcgacttcctggaggccaagggctacaaggaggtgaagaaggacctgatcatcaagctgcccaagtacagcctgttcgagctggagaacggccggaagcggatgctggccagcgccggcgagctgcagaagggcaacgagctggccctgcccagcaagtacgtgaacttcctgtacctggccagccactacgagaagctgaagggcagccccgaggacaacgagcagaagcagctgttcgtggagcagcacaagcactacctggacgagatcatcgagcagatcagcgagttcagcaagcgggtgatcctggccgacgccaacctggacaaggtgctgagcgcctacaacaagcaccgggacaagcccatccgggagcaggccgagaacatcatccacctgttcaccctgaccaacctgggcgcccccgccgccttcaagtacttcgacaccaccatcgaccggaagcggtacaccagcaccaaggaggtgctggacgccaccctgatccaccagagcatcaccggcctgtacgagacacggatcgacctgagccagctgggcggcgac

SEQ ID NO: 5754 - protein, 1367 aa, synthetic construct
  REGION 1..1367: note = Description of Artificial Sequence: Synthetic polypeptide
DKKYSIGLAIGTNSVGWAVITDEYKVPSKKFKVLGNTDRHSIKKNLIGALLFDSGETAEATRLKRTARRRYTRRKNRICYLQEIFSNEMAKVDDSFFHRLEESFLVEEDKKHERHPIFGNIVDEVAYHEKYPTIYHLRKKLVDSTDKADLRLIYLALAHMIKFRGHFLIEGDLNPDNSDVDKLFIQLVQTYNQLFEENPINASGVDAKAILSARLSKSRRLENLIAQLPGEKKNGLFGNLIALSLGLTPNFKSNFDLAEDAKLQLSKDTYDDDLDNLLAQIGDQYADLFLAAKNLSDAILLSDILRVNTEITKAPLSASMIKRYDEHHQDLTLLKALVRQQLPEKYKEIFFDQSKNGYAGYIDGGASQEEFYKFIKPILEKMDGTEELLVKLNREDLLRKQRTFDNGSIPHQIHLGELHAILRRQEDFYPFLKDNREKIEKILTFRIPYYVGPLARGNSRFAWMTRKSEETITPWNFEEVVDKGASAQSFIERMTNFDKNLPNEKVLPKHSLLYEYFTVYNELTKVKYVTEGMRKPAFLSGEQKKAIVDLLFKTNRKVTVKQLKEDYFKKIECFDSVEISGVEDRFNASLGTYHDLLKIIKDKDFLDNEENEDILEDIVLTLTLFEDREMIEERLKTYAHLFDDKVMKQLKRRRYTGWGRLSRKLINGIRDKQSGKTILDFLKSDGFANRNFMQLIHDDSLTFKEDIQKAQVSGQGDSLHEHIANLAGSPAIKKGILQTVKVVDELVKVMGRHKPENIVIEMARENQTTQKGQKNSRERMKRIEEGIKELGSQILKEHPVENTQLQNEKLYLYYLQNGRDMYVDQELDINRLSDYDVDHIVPQSFLKDDSIDNKVLTRSDKNRGKSDNVPSEEVVKKMKNYWRQLLNAKLITQRKFDNLTKAERGGLSELDKAGFIKRQLVETRQITKHVAQILDSRMNTKYDENDKLIREVKVITLKSKLVSDFRKDFQFYKVREINNYHHAHDAYLNAVVGTALIKKYPKLESEFVYGDYKVYDVRKMIAKSEQEIGKATAKYFFYSNIMNFFKTEITLANGEIRKRPLIETNGETGEIVWDKGRDFATVRKVLSMPQVNIVKKTEVQTGGFSKESILPKRNSDKLIARKKDWDPKKYGGFDSPTVAYSVLVVAKVEKGKSKKLKSVKELLGITIMERSSFEKNPIDFLEAKGYKEVKKDLIIKLPKYSLFELENGRKRMLASAGELQKGNELALPSKYVNFLYLASHYEKLKGSPEDNEQKQLFVEQHKHYLDEIIEQISEFSKRVILADANLDKVLSAYNKHRDKPIREQAENIIHLFTLTNLGAPAAFKYFDTTIDRKRYTSTKEVLDATLIHQSITGLYETRIDLSQLGGD

SEQ ID NO: 5755 - RNA, 12 nt, synthetic construct
  misc_feature 1..12: note = Description of Artificial Sequence: Synthetic oligonucleotide
  source 1..12: mol_type = other RNA
gagggcgccgac

SEQ ID NO: 5756 - protein, 4 aa, synthetic construct
  REGION 1..4: note = Description of Artificial Sequence: Synthetic peptide
EGAD

SEQ ID NO: 5757 - RNA, 57 nt, synthetic construct
  misc_feature 1..57: note = Description of Artificial Sequence: Synthetic oligonucleotide
  source 1..57: mol_type = other RNA
aagcggaccgccgacggcagcgagttcgagagccccaagaagaagcggaaggtgtga

SEQ ID NO: 5758 - protein, 18 aa, synthetic construct
  REGION 1..18: note = Description of Artificial Sequence: Synthetic peptide
KRTADGSEFESPKKKRKV

SEQ ID NO: 5759 - RNA, 115 nt, synthetic construct
  misc_feature 1..115: note = Description of Artificial Sequence: Synthetic polynucleotide
  source 1..115: mol_type = other RNA
gcggccgcttaattaagctgccttctgcggggcttgccttctggccatgcccttcttctctcccttgcacctgtacctcttggtctttgaataaagcctgagtaggaagtctaga

SEQ ID NO: 5760 - RNA, 100 nt, synthetic construct
  misc_feature 1..100: note = Description of Artificial Sequence: Synthetic polynucleotide
  variation 1..20: note = n is a, c, u, g, unknown or other
  source 1..100: mol_type = other RNA
nnnnnnnnnnnnnnnnnnnngttttagagctagaaatagcaagttaaaataaggctagtccgttatcaacttgaaaaagtggcaccgagtcggtgctttt

SEQ ID NO: 5761 - DNA, 41824 bp, Homo sapiens
  source 1..41824: mol_type = other DNA
ctcttgatcctggtctcaccatgtgatacacccacttcgccttccgccaataattggaagcttcctgaggccctcaccagaagcagatgccagcaccacacctctggttcacctgcagaaccgtgagccagttaaacctcttttctttataaactaccagcctcaggccaggtgtagtggctcacacctgtaatgccagcactttgggaggctgaggcagtcagatcacctgaggtcaggagttcaagaccagcctgaccaacatggcgaaacccgtctctactaaaaatacaaaaattagccgggcgtggtggcgggcgtctgtaatcccagctactcaggaggctgaggcaggagaatcgcttgaacctgggaggcagcggttgcagtgagccaagcgcgccactgcactccagcctgggcgacagagtgagactccgtctcaataaataaataaataaataaccagcctcaggtatttctttatagtaatgcaaaaatgaactaatccagagagtaagtaaacaggaggaaggaccacctagatcagaagcttacctcacacaggtgagggtggctagcgggtaagggattagaggcggtgagcacagcagaaggtgtgggtgaagaggcaggtacaggccaccctgtggaggacttggaacagcagctaaggctgtgggaccagactctttatgcagtaaagagccacagacaattgtgagcaagacaccttataaccaggttttagaaagaatcctcagctggaaggaggagattctgcaggaagagggtgggggaaagttgaagttaactccaaccaaagtcaaccttaaatattaacctttttttcttctgactttcattgacttttccgtgcattttcagtgcccttttcttgctgtaaagtaaattttaaatattatgtcaataggtcacagaggcaacagacaggcaaggtatggttatgagaaaaacatttccctaaacaaaattagaagacagcatttgatgaaagatttttttcctaacttgtgagtttgtttacataaaaacacttacaaaattagtcaatcaaaataacatggagtcatttacttaaagaattccttacgtttaaaaataaagtacttgaatatggaatcaacctaagtgtccatcaacttaagtgtccaatttaatccatcaactggattaaaaaactgtggtacatatataccacgggataatactcagccataaaaaagaatgaaatcatgtcttctgcagcaacatggatggaattggaggccattaacctaagtgaaataactcaaaaacagaaagtcatttgagaccagccttaccaacatggagaagccccatctctactaaaaatataaaattagccgggtgtggtggtgcatgcctgtaatcccagctactcgggaggctgaggcaggagaatcgcttgaacctgggaggcggaggttgcggtgagccgagatctcaccattgcactccagcctgggcaacaagagtgaaactctgtctcaaaaaaaaaaaaaaaaaaaaaaccgtatgttctcacttataagtggaagctaaacagtgggtacacgtgggcatacagagtggaataatagacactggggactccaaaaggtgagaagggaggagaaagtaaggattgaaaaattacctcttgggtacaacgttcactgttccggtgatgggtacactaaaaagcctagatgtaactgttatgcaatccgagcatgtaaacaatctgcagccgggcttggtggttcatgcctgtaatcccatcactttgggaggccaaggcagcaggattgcttgagcccaggagttctagaccagcctgggcaacatagtgagacctcgtctttacaaaaattttaagaaattaggtggccatggtggtgtacacctgcggtctcagctgcttgggcggctgacatgggaagatcactagagcccaggaattcaaggctgcagtgtgccatgactgtgccactgtactccagcccagatgacaaagactatgctttaaaaaaatgaaaatttaaaaatcctgcacttgtacccctgaaatatataaaaatagaaacagaaacataaataataataaaatgcatttcttttacacataaaacaaataaaagtaaagtacttgaaattagacgattccagaaaattgttgacatgtttgttcccctaacaatttggtactttggtctcctttatgaaactgtgaaagctccgagccaaaagctttgtctttcttcattcttgcatctttagtacatatcacaatgctttatatatgacacgtgcatgactatttgttgttaattgaatggtatatcatatttcaatagacattttccccaacattctattggaaaacttttcacacacatagcaaactgaaagaattttcagtgaacacttgaatttctaccaccaagatttcactattaatattttactgttcttagtttattacatatctatccatgtctgtatccattgatcaatccatcttatttctcttggtgaatttcaaattaaattatagccataagtatacttaaatacatccatacgctgaacacatcagagttgaattacagttcaagatttatttacattttttttcttctgaggcaaaatcacatagcatgaaatgcaccaattttaagtgtacatttgctaagttttgaagaatgcatacacccgtgtaaccaaacccctttcaagatgtgaaaatgaccatgaccccagaaaataccaatacctcttcctgctcaggcctcatctctatctctgagaggcaatgacttttttatttaaattttttttagttttgcctctcctagaactttatataaatggagtcatatagtgtggactctggaatagacttctatcactcagcataattttttgagattcatctaggttgtgtgtaccagtaacacatttctttttgtagaaaagaaactattttgcaatggaatgcagtagcgttctattgtataattatgtcaaaattgtttttccattctcatattgatggacacccagactgtcttcagttttgtgttatcaaaaatgaagctactataaacattcatgttcaagccttggtggccatatgttttcattgctctggggcaaatacctaaattgctgggtcatggggtaaatgtatgtgtagacattttttagaagcttttttttttttttaacaaaaatgccaggctatacttaccatgctttttctctcctagtttgccaatttattatttatttatttatttattttcttgagacaaggtctcactctgttgcccaggctggagtgcagtggcacaatcatagctcactgcagcctcaatctcccagactcaagtgatccttctgcctctgcctccagagtagatgggaccacaggcacgcaccacatcaagctattttttttatatattttttgtagagatggggatttgctatgtggccaaggctggttttgaactcctgggctcaagtgatcctcccaactcggcctcccaaagtgctggcactgcccctggactagcttgccaatttaaaagaaatccctgagtaagagcacccaaggtccgctgaatgcccttcacctcactcggaattctagagcatccgaggatctttccattccatatgatacacaccctaccacacactcaaccaacagctgactggatgagagaggtactgaacctaaaagtggccatctgcaggttgtctagaagcccaagagatagactgttcaaagatctggccacaatgggatgacaaagaataatcagtccagctaactcccttcttattaattagaaatggagacactggaaagagacatttagttaaaagtggacacagaaggaaaaagacacacaagcaaagcattcttcagatttctttgagagcagctaaattgatggttaaagagacatgcggaaattcatgcttttctaaggaatgagctctttaggagtttctcttgcaaacaaagagaaataaaattcccacataatctggagcactctaaggaagggtagaaaaatccatgttcttgctagtacaggacttagagtcttaaaaattagagaaattcgtttaagatttatagtcttaaaaattagaaaaatccacccacctgatccacattgagaagctggaatgaaataaaaataaagataatgattaaaaggaatattccctcaatatttccactccctgcatccccgacccgtctgcgtctccctctactctcatacatactccagtaatatttggccaaaagtagaagccagggggttagaaaaagaaataggataaaccaagacaaactatcaaggaagtaaaaggaacatagaggcaaacaaaatcctcatgtctctttccccctcctcctgacatagccctgataactagggaggaagagcatctgctaccgggtgcatcctctgaacattccaatgacccgacccatggaaagagaaccaaattcttcagcccagcttctaggatcttacctcaagagagtcttaaaattatgaaaagatatgtatataaggatgtttgctactatgttgtttatcatgtaaaaattgtaaacagcaggttattggtagagttccttcaaaatgagctgtgggccgggtgtggtggctcacacctgtaatcccagcactttgggaggccaagatgggaggattacctgaggtcaggagttcaagattagcctagccaacacggtgaaaccccatctctactaaaaatacaaaaagttagccatgtgtggtggcggatgcctgtaatcccagctactgaggtggctgaggcagaagaattgcttgaactcgggaggcggagcttgcagtgagccgagatcacgccactcctctccagcctaggtaacagagcgagactccatctcaaaaaaaaaaaaaaaaaagaaaaaaatcagctctgtgcagtgctacatgtggattaatgaagcattgaaagttacaacccttttggtaattgcaagggaacctggaatagatctacccaccatgctatctgacctttctaaacttgtgtgtcagttgcaaggtttattggtccactttttagatgagcaagccaaaggtgaggttcatgcaactgtggcacacctatacacaggtaaagcttttggacacagtggcctctgttactcaagggttcttaccccagtcaaagggtgttctactgcaagtagttcttaagagagaaaattcaatgtgcatttccctttggaataataatactctgaagcacagagagaacctggcacacgacaagggtgatggtgatcacaccactagtaaagaatccagtatgcactgggtaccttctctggacaggccctatgctgagcatttctcatactattgtctgatttgatcctcacaacagtcctagtgatcagtactatctattattttgcccccatttgatgggtgagttggagaagctatacaatatataaagctggtggtttgtctcttggcttttgcatcatcagacagttcaccccagctaaagaaatgatgacgggaacaagaaaaaagccaaggttaagggcacttcagaacttcagaaaaacatttgttgcctcttccaatttttggatttgttgggacagagaaaggctgtttaaaaacaattcaagagccaaagacatacaagtgtttgtttcttggtttttctttaaatgccctaagctatttttcatctctaaaaaaaagcacagggtagaaatttccattcacctgtgactggctaatctttagcgatcacttagcaactgggtaacaaatggaggttggcaaagcccagctgattagcattcttttttagtcaaaagatcagagttatcacaaggcacggccaacagctctgaggcttacaggcaatggaaaggtcagacaaagtcgctgttcgttttgtttgtctttttttttttccttcagagcaaaacaagttttctttgtttatttggtttaaaaaactcataagatctttgcaagagaacagatcctggattgtgggaagggtccccagcttgctcagtagagcttctcagtttttctatctctacagaaatctacatcagcccataatgaagatcggctatgaaatgctttgaagtctctacaaaaaaattaattgtacaatagattttcaccagtggagcaaataacagcaataatttgcaataagtgaggaaaacacatttacaatcacaaagagaattaaaagaagcttgagagaccaactagtccaatcctcccattaggacatacctcccgaccagtgaaaggaggaagggggccactaggtatcattcttggttatccactcccagggttcacagcatctgtatcaggaagttctttcttaagtttcactggagtccctcttgctactatttccagctaatctcttcttgtaactcttcataaaagaggcatcaatctttcttaagagctatcttagtcttgcttgatgtgcgtaatgaattcatgaagacctttctcttctccaggttcaatttttaaatccactggggctggcagcaggactggactttctaagtcctgaacatagaaagatttataacacagcccttggctgcaaggagcttatgttttcatggggtaaagtagatgtttaaagaaatgatggcagcagagtgttattgtgtaaagttctgacattctttgtttttgaaactttgcattttgatatctgtccattcgagattaccctatttttccatttcaaaattttagctatatttttgttacaaaatttaattcttcattccactgatggggttggggtgggggggtggggtgcaggaataatagaatgggcctgccatctagtggcaaaatgagacaaaaagaacaccaaactgtaccagcatccttgtatctataaggaggagaacaaggaatatatttcctggattcaaggtatcaaaaattgtaagatgcaccattggtttagtaagggaacaaaaagaccaaaaatggaaacaaatacaacaaatatatacatcacctggattttagaaatgctaggagaagtgaggggcatcttaaggaaatatgctcatttttcactactttctctctaacagttggcagctgatgatgagtagtgagtgcagctaacgatggggattaccatgcacccagtccctgctgtatgctgaatatttcacaattgtccacaaaagggatatcattttagccatttaacacctggagaatgggaggttcaagaaaggatccactcttgaccttagagccagcatttaaactcaggaggctggcttacagagttcacaattgttctactctcctaagctcccttctgctttctctgcaaaccgtagtgctttcccgctgctttccttgaactctctcctagacacacagacaaggtctgatgactccaattattggacttccccgcatactccagttcactcccctctcctggatcagatccatgagctgttagctcctgaaactgttccacctcagaaacctctatctcaagccccagggtatggctctattcccatcacctcttctcttccactttctagtgatttctagaaaacctttcctccctgcttacagatgccccctaacttgcagacaccctctaagtggtcctgagatagcaacctgattccttcacagccttggcatgaaatttaggaagccaggagtgtcccagagggcaacatggagatgcagagagaacaggtggctcaggggaggcctagggtcaggaattgagtccagagagggtggccccctcatcaatagaggcaaaacatcaggggccttgaaattcagcagcaagtctcagcatattggtccaaaggacaagtgcaattagacacatctcaagaaagaatggtgcggaacattcggggacagcctctctattccacagcagagaccagcatgctgggagaggcccatcccaccaggagtatgggtaggtctctccctgcacccagaggcattttaggaaaacaggagggagatgcaagacagcttaagttaacccagaaatgactactttaaaccataagaaacagaatattcttgctttggcaagtttaaatagtatcccaccccagcctccagcattggtagaaatggggctctaaacagcagttacagaagacaaatgaaggccaaatctatgcagatttgaataacagcatgtatctatcagcatgtattcaagaaagtagagtcactgtggatatcatggaagaagagacaggatagggattagacctgacacaattgtgggagaagctgggaaggcagagatctggaaggggaagtgagagtatcagagaaaactcactgtccagtcctcctgaagccctggccaagtgtattgatcagagcttgctagagatcagggaaggaaggccaagtgctgttgggctgctgaaacaggatgacagtaggggagctgggatgtgtgggtagggagtgttggccactgcaggtctacggccaagtggctggtggtgggccaacaatcagaaagaagacctggacatggagaggaacagagcaaagacgggctggggcccacagggcattgcccatctgatagtcacgatatcagcctgcaaagggatccagagaaaaacgaccactatttctcttctgcctctcaaacctcatgcaagtgtctcttttggccaactctatttaggatccatagagggaagggattctgaaaaacacagttcctaacatagccagaggtgactgtggaacaatccagcacactgagtacatttcaatcctgctccaggatttatagctttaaagttattacacatatgaacacgtggcagcgccaaatagcactggttgaattcagagaaagccatggaaaaggtgactctggaagtggacccgatatattttctatctaaaatttttttcatgcactgaacattcatcacatagtagctgacgtgtaacagattctccgatgagcaatataattcattacctacacatgctgtgctgataccaacattttccccaaaccttccttcttccttagtagagagttctcaaccaggatctgccacctccagttattcacaaacagtggcggaagagaaaattccaagcttcctgtgtgcctcgcattcagggtttcaagaacagttctggtgaatcaataactgttctttcaacaaggatggagagcaattgaaaaggttggctgtgacatgaaattgcagtgtggctgcaatttccttgtattttctaaacaagaccttaaaggctccagaacattgaaacgctgtgggtgtcattcactcttacaatagccatttccttggaccgtcttcctttctggatgataaaagcccaaaatgccaggcactggctgtcctaccatcacacatagccaggacctgccttgtgtcccaatcctggctcccagcatcagagggaaagttgtgaaaaggtgctgctttctcccagataaaaagaaacatccttttccctcctcaggcttctgcagaagacagctctggtggccgtgttgagagctgtgagagaagtcaggagaatcacagagaagcaaaacccagccctgtgacactgctgacattgtgagacaacctgcaaccacccactgcttgattcctctcatgccagatgatcaagccactcttgggcctgatacatttttaacatttccagttttgcaagggattcactgctttttcgcagcccactggacttaactagagtgcccaagcaagcccacttagggccacagaaaaacccaagtgctctgtatgcaatctccatgctttcctcgggctgcctctcatgtttcctgccagactctgccatctcctggctttgctactttctgttgccagagatttgctctgaaccttggcttctgctgactcaatcatcaggctttggatgtattaacacaactttgccctttgttctccttcagaataagaagtccatttcctgccccatgcatcctttcaccccaggtaacctcatgccccagccttgacactgccaagctgggtctacctcatgcccaccaaacctgtcccaacccactcctcctataggcataaaatagatgaatggagaccacgtggaactagtccataggactgtgtataacaaagcttcatgggaatttttctagggtcacaatatattttcagttgaacgcacggtgattcacgcctgcaatctcagcactttgggaggccaaggcagaaggaccacttgaggccaggagttcgagaccagccagggcaatatagtgagaccctgtctcaaaaattaataaaatcaaattaaaaataatattttctcctatgtaattccttagagttgaatgcatagacaccaaaaaggggaaagtttgaaaaatcagctatagtaccaagaagaaatcaatgcccagagaaggaataataccaaattcattagagtcccagactcttcctctgtgttaactctagtcatgtatttgtttatgtggaggtcttctacagtaagtattggggcaatactgatacctgttaaaggatattatgcctttgacaaacgatttttttcttccactacatgctaaatgctgtcattatcaatatagagaatgtagttaaacttccacagtgggcacaggtgaagatttcactgccatcaatttcaaacctaaaccctgatctcagtcagtatttataattttatgagttataattaggacatccaatttgtcttgagtttgcacatcattatgcttcacaatgaaaaataagcaggttcttggtgcctgaattttgttaatcattcttcctggttggggaccttaatcttggcttcaactctgacattaaattaaatacacttgcacacaaattattctaactgccttatttagccagagaagaacagggcctgtccgtgaagcatttccccattacctgcacctgagctagtccctgatctagcactgtcagctccgcaggcaggcctggcaaggtttaccgttctgccccctgccctgggaatctgtatccaggtctctgagtgttgcttcttctggcctaccctatgcccccacaaccttcacacccacccgctactccaaatctgattgggtccctctacgtaggtgtttccaagtggtaaactgcacctagtgctatcgtttggatatctgtcccctccaaacttcatgtgggaatttgatccccagtgttgcaggtggggcctagtgggaggtgttcgggtgatgggggcagatccctcatgaattgatgaatgccctcctttgaggatgagtgagttctcacccttagttcccacgagaactggttgttaaaaagagcctggcaccagccctttctctcctgctccctcgctggccatgggatctctgcacacaccagctccccttcaccttctgccatgagtggaagcagcctgaggccctcaccagaaccagatgctggcaccgtgcttcttatgcagcctacagaactatgagccaaataaacctcttttctatataaattacccggtttcaggtattcctttatggcaacacaaaatggagtaggacacctagacatccaggtttataaatgtagacacatatatacgtgcattttcacacatagcttgttagaatgtgtgtgtcgctggggctcttttatctatacacttggaaaaaggcgtctgcttcattttatttttgcctttgctcacctcggctcctttatttctgatactagcaactcaagaaaggggcattttaattcaatcaaccaagaaaatcaatcccaattgacctcgggaccatatttttattttcattgaaagttaactaaaattattgaaaagaatgaaaaataataagaaacagaaaaacctaatagcttggaacaacatgtattcgctaattttgtttactaatacctccatccaggggagttatttctagcaagattcttttttatttttatttttattttttttttttttgagcggaatctcactcagtcatccaagctagagtgcagtggtgccatctcagcccactgcaacctctgcctcccaggttccagtgattctcctgcctcagcctcctgggtagctgggattacaggcacataccaccatgcccggttaattttttgtatttttagtagaaacggggtttcaccacgttggccaggctggtctcgaactcctgacctcaaacaatctgcccacctcggtctcccaaagtattgggattacaggcgtgagccaccatgcctggcctgcaagatccttttttattgaggcaattaaaagttagaagagaagaaatggctgtgtaaaaataggagcagatagaaaatgagaatggccgggtgcagtggttcatgcccacaatcccaactctttgggaggccaaggctggtggatcacctgaggtcaggagttcaagaccagcctgcccaacatggcaaaaccctgactctactaaaaatacaaaaaattagctgggtgtggtggtgggcacctgtaatcccagctactcaggaggctgaggcaggagaatcgcttgaacccgggaggcagaggttgcagtgagccaagatcacgcctaggagtgcaaaaaaaaaaagaagaaaagaaaagaaaatgataatcttaccatctcagccctcaagtaaaagtaaagggcagggctaagtcagcagaatgatcaggaaactgattccacagccctattgcctaaatagggagggacaaacaagattcaggcatttccctcttggtctacatgtggattaggtcccccaccagtaaaaactcctccctaatagttctcacagttgttcacctaaacctgagcagtgctctggggtgcattagctggtgagaagctctccttgcttgagccagttttaggagaaggaacagtgggattgaaagtcactagggagctagcctatggccaagtgctatgaatggcctgccatgttccagaaacccccatgtgagatctttctctgggttaaagctccatggttgctaattgctgtgagagtgatagagtcccctaagtctaatcaagcctggaagctgaaggacattgtgtggacttgggccttgagaggttcccgaactccagaattctgcaagttatatgactttcatttaaattttctttttaattgagaaggagtctcactcagccacccagggtggggtgcagtggcttgatcacagctcactgcagactcacactcctgagctcaagcaatcctcctgcctcagcctcctaagtagctgggactatgggatatgccactatgcccagctaattattttttggtagagatgaggtctcactacactgcccaggctggtcttgaactcctagccttaagcgatcctcctgccttggcctcccaaagtgccgggattacaagcataagccaccatgcctgcagttatatgacaatgattgtttctctttaaacgaggaagcattagctcagagaaatgagaaatctctgtatgtagtagatgatgcaaaccatgctaaaataaacacatataattggagaagctaagatcattcttaaagctaggtcagtcattccagctgccaatcaaaacctgcacacaaaaacctggacataagtatttatagtagctttatttatttataatttggcatagttgatgccaaaacttggaagcaatcaagttgcccttcaataggtgagtggataaacaaattgtagtgcatccacacaacaaaatacgattcaacgataaaaagaaatgaggtatcaggccatgaaaagacatgaagaaattttaaatgcgtattactaagtgaaagaagccaatctgaaaaggctacatactatatgattccaactatctgacattctggaaaatgcaaaaccatggagacagtcaaaagaccagtggttgccaggggttgcaggggaggtagggaaagagagggggataactaggcggaatacagggggattttagggcagtgaaactattccatatgatacggtgatggcggatatgtgttatcatacaattgtcaaaacctcattcaacacaaagtggatcctaatgtaaactatggacttcagttgagaataatgcatcaatattggctatcagttacaacaaatgcaccgcaccgatgcaagaagtttatcattggggaagctgtcaggtggaagatttgaggagatacaaggataaaggggataaatagtatataggagacaaagaacaagacttggctgaaagaaggcaacatattagaaagaggttttataagaagccattcaagtgaagaaatataaggatagactgagagccgattctttgttaaagccgtgctttccaggccttgctcttcccaatctttaccaatcttcagcaatgcagaggaggaaccagagactctgggagacctgagattcatctgcacacccagaaggtggtaaaagcagggtttggacgaggtctgtctgcctcacagctcctgatccttcctccaccccaccctccctttgactacttagaggagaccccagcttgtcttctacttgggacaggggtagccatggaaatactaggaacaacttaacagttattcccagcagctgcctaaggagattttctctgcaagaacagaggataatgaattctcctaaagaatgagagaaatcccagaggtaaacagagatgcaaacacccaaaaaggtcacagtcacaacgatagcccagcaagacagcatcgaacgacgagtctgctctgtctttagagaagaggggtgttttctgagagcctctcactgcagattccctgctgatctggcagctccagcctagcgctcagaggaagccacaatgagaccaattttccacagtcctaagaagagacacatccccttctgtgtatacatttctcttgtattcactgttttcactcaccccctgcagcctgcatgagatttgaaattacaacccttataccttcaagtccagattatccttcttaaagggaatcaactattgttgaaatccccagataatcccccaacctcatttgtaccattttttgtactgctttcccagaaagttcaagccctagactgaaggaacacatgaagtaaaattgatggctttgaatggaaaatcccagccaagaatccaaccgaacatggtgtaccagggccccaagcatgcttcctgttccccactagctaccggctcccaggcccattcctgctcagactgccgtgggcctgtgcagacagccctagaggaggcgaggaggttccttccagactggatgaggtctgggtaagggcagcaggcacagtgcagactcctcccgcgagctcaggtcagggcacagtctggctgccgtcaaggtttggatcttaatctccgatttggctctaaaagctgctcaggcagcacccagtgcaataactgtggggcaaaatcaagaagtatctagcaggagagggtttccagaacaactgtgccaggggtcctaaaaaccgagcattgagcctatggacactagcccctggatggtctagaaggcccaggatcctactttaacctgttctcccagccaagcaggagcaaaccacatctgacttaatatactcttgtggaagatctacctgctgtatgcttcctcacagtctctgctagagccactagcatggtacaagtgaaaacaagcttgcaggacggacacgtgggagataaaggggaaagagaggaaagagagggaaggagggaaagtgggggagtgaaaacagtctctaggtgggcaaagggtaatgaaaatttcagtgctagaactcccttctcctccctgcttcatttctgtatctttgaatcttatcatttgctctagaccccagtgaaatctccacaaagtcttctttaatgccacaactgaatactgagagctccccatttcccaagtgtgttgggcaatttcagtcggaaccaccaacacagccctttatgacatgcctctggtttcgagtatataacctttgttcctgacacactctccaaacaggaggcttcacttgctcaaggacagttatgctagacactttccttgtagccaagatctaggactgcacttcacccttcaagaggggcattcgctcactgattgaactccctccccaagtcccagcatgctctcatctatgtaggcactggcaggagaaccctcgagagcttttcttcaggaccaagggaaggtagtgctcttgttccctatctctgggcctccagagtatgagggcacaaaggtacagcagagggcctgccaatccttggcctaggcatttcaggtggtctggagctgatattcatccagaaatgggttactatttttcaaacatacatacacacatttgatttataaaatacaagccaggcatgaggacttatgcctgtaatcccagcactttgggagaccaaggcaggaggattgcttgtgttcaggagattgagaccagcctgggcaacatgaagaggcattgtcttttctttgctttttttttttttttttttttttgaaacggggtctcactctgtcacccaggctggggtgcagtggcgcgatctcggctcactacagccttcacctcctgggttcaagtgattctcctgcctctgtctcctgagtagctgggattacaggcacccatcatcatgcctggctaatttttgtatttttgtagatacagggtttcaccatgttggctaagctggtcttgaactcctgaccacaggtgttccacccacctcagcctcccaaagtgctgggattacaggcgtgagccaccatgcctggccaagaggcattgtctttacaaaaaaaaattgtttaaaaattagccaggtgtggcagtgcatgcttgtggtaccagctaattgggaggctgaggtgggaagtttgcttgagcccaggaggtcgaggctgcagtgagctgtgttcacatgacaccactccagcctaggtgacgaagtgagaccctgtctcaaataataatttaaaagaataaaatacaaagtcatttcaagccattactgactttttattaacattttgttataaatttatttttaaataggtagatattagaagttcaggtcccaggattttttgacatttgaaagaacttcaatgtcatattagaacattttggaactactgatccatacatgaatgctgttcctctcctcattcacagtcaggtggcatgctgctagctgcagtccagaatccaggttccccatttatgaacacacagtcattgagtctgccaaaaatcagcttctgaatttgcagaagttcaaggcttagggaaaagtttaaaggcaactgatgcaacagtcacgcttgaccaatttgctgggagctgaaatcatacacaatctataaatatgacttaaactgttctatttcagtttataataaacaataaggctcagctccaatccttccctctccccagtgaggattttttttttttttttttttttttttttgttgagacggagtctcgctgtctcccaggctggagtgcagtggcgcgatctcggctcactgcaagctccgcctcccgggttcacgccattctcctgcctcagcctccccagtagctaattttttgtattacgcccggctaattttttgtatttttagtggagacggggttccaccatgttagccgggatggactcgatctcctgatctcgtgatctccccgcccgcctcggcctcccaaagtactgggattacaggcgtgagccaccgcgcccagcccccagtgaggattattcagagccctacccttgcatagttaggaaaggtggggaccaagtttcatatttcatggtattaacagacacaacaaaactctctttccttgacccaattcactgcctttattttcacaaactacttggtgcaatagtcatttagcatagcgtgtcccactaaaataaatggcggcatcatttaaatgccatactaacttgttatatttctacgtgcttataaaccatgaggcaactatcaagttaataaatatccaaattctgatggatttacatattatattgttgacactgtatttgcattcagagcaaaaatgaaatgggtcttaaaatgagtcgtgataaagtgattgctatcaaaaggctggaagatggatccagacagccgtgggcttgcaactttctctgtcgaacaacaaacatagccaaagattaaagtgctcaaataaaaattagagcaggtctgccaaccccatttccacctctacctgatgagaccagtgttcatgaattactatggcccataaactgtgttgtgcttcttatccactattgaattcaatcctccctaacaagcagatgctattcttgtcactatttaacagataaggacactaagcctcggttgtgtaagaaaacacaagtaaacaatctagtacaaagcaaactcaggcaaagtcagactcagaccaagattttctgaaaatccaaagcccatactattcctcctacattactttgcctctcaagtgaaatattatttctttgcctagcagccttcacttacagccagggtgggtgtggacagatctgtatatggctctagtataagaaagtggggagatgtttagaaggctcaaaaaattgttgacaccaaaaattcaaactatcccctgtccacagaagtcccagctgagtttttaaatcaatattccctcagctgaccatgataagacagagatttcaaaaatcaaatatgcacagacatgttccacttactcactcatgtaaacttcttaaaaactcggcaatgaattaccatatggagctccaagtacaaatgctgtgtctatcgcctttgaggtctccaggcagaggtgagcagtgaaggaaggactctaggggatgggcataatgcatggtgggcagcttacccatctcaggaactggcttcagccccatggcaccacagggatggaggtaagagattgcaaatgcagtgggctgactgcaactgtgctattaggaaaactgctaaccccaatcagcagcaatcacacttgatcttcaggatgactttggagcagttctcagaactaagcagtggagagaaggccaaatgaggttatacatgactcagataaagctatggataaattaattttgttttcttgtgtgaacatttatcccaactgaagaattatagtgttggcatgaatatgcattaaaagaacagaagctgaattgtgttccaaaggaattgtattgactacacaagcagctaatgacatggtttacttctctggaagaatcagcactcattttcagagtgaccttatagtttaaattctttgaattgagagcacaatgaacaagctcctctactgaatttataagtgactatgacacggcaacaccaagtcactatctgggtaactcatctgcctgtggaaacctgtgttgatcgttgcttttgcaccagccttcctaagctagtgctgtctgcaaacagacctttctgtgcagattaaagagagcctgattcagtagaacccacatgtcacagatcatttgctttgcctctctcgacacagaacttcagcatctgattaaaggaggccaggtgtccaacatctggccagatggatttgtttctgagcaaagtcagaggaaaccagaggtagacatgcacctggtccccagtcagcttagcccttttaatgtgcctagccatccctgaagttctgccctgttaacgaaataggaatttgccattgctatccttacaggtgttcacaaagccatagaataaaatgactacaatttgagatcaactgactcaaaaactttatctcctagaggaaaggaaactaaagtccacagaagttaagtgactaggccaaagttacccagctaggagatggcaaagcttttaaagacaccagactctagattccatggcccaacctcactcctggttattagttgcatctaagacaatggctttcaaactttagcatcagaatcatctggagggcttgttaaaacacagattgccaggtcccacccccagagtttcagattcagtgtttctggactggggccctagaatttacatttctaacaagttccctggggaatggtgatactctcggtgtagggcccatatgtggagatccactgaggtagcatgtgtgattagataggaggaaaagttgctcatctgaccccagggacacaaaagatttatctaaaaactcagaataaagaagtttgttccagtttccaaatctgttctaggctatgtaagttagggggaatttgtcttctagaatgcacattttagaggcttttaaatgtctgggggaaaggcttctgttcatcctgataaaccatcctaaggaagctttacatttgagtctgaaattaaagatgacgaaataatcctcagacaaatatagaagcccagggaaaaggatgggtggcaatggaaggtgggcacaggcatgtgggcggtgatgtggcttggctgtgtccccacccaaatctcatcttgaaatttagctcccctaattcccacatgttgtaggagggacccagtaggaaataagtgaatcatgaggttggtttcccccatactgttctcgcggtagtgaataagtctcatgagatctggttttataagaggtttcccctttcccttggctctcattctctcttgcctgctgccatgttagatgtgccttttgccttctgctgtgattgtgaggcctccccagccatatggaactgggagtccattaaacctcttttactttacaaattacccagtctcaggtatgtctttatcagcccggtgaaaatgaacaaatgcaggtgggaaaagaaggacacgatcagtggatggaacaaggagcactggggctcagaagcagtctggctcagttgggcacacgcaatcaagaacatgggaaaatggcagctggattgttgagctggaatcaggaatgccagaaataggatagagggcaatgccagtgttggttcactaagagagaaagcaagacccagctgcgactgcagctgactccattcatttattgaatcattcagcaagcatttactgggcatctcctgcatgctaggccctgcactaggactggggatgcaaaaagtaagaaggcattgcccaagaaagagaaattgtgaacacaaacaactctgatggaatggctaaatgttcaacagaggtacaaagcactgcatagcagagttaacttctgcctggagaaacctctacttgaagtttctcttgcttttatcactggccaaaggttggtttaccccagcgctctatccttggacttcttgttgttaaaggcttttgggtccagggctggtatttatgcctgtaatcccagtgctttgggaggccaaggcgggaggatcacttgaggccaggagttcaagaccaatctggggaacatagtgagacccttatctctacaaaagtgagtaaataaattagctgggtgttgtggcacgagcctcacttgagctcaggagtttgagtgcagtgagctatagtcatgccaccacactccatcctcggcaacagagcaagaccctgtccctaaaataaaataaaataatataaaataaaaatttagtccagtggtgaactccaaatgctatacttgaactcacatgctgaatctccatctccaacctgatttcctccaagctccatctcctaggctgtcacttccagctgtcctctaggcatggatgcctacatgtcaacctttttatctcaacatgtccaaaagcagattcattttctttcatatttttaatcatataagctaatggctttactatctaaacatccttccagacatttttggctcttctcactcactttccatttctgatgtcaccagaatctcttattcctactcccataactatctctcatctggccttttctctctgtaaccactgccttcagcaacactccactatgctggctccttcagacaattagaagtgtgagggagaatggatgagaaaggggtaaaggccctaggctggcctgtcacaggctctgcccagaattcaactggtttttgaatggtcaaagcaaaaaaccaactcatgaccatctctgaatgtcagactaaggacatttgactttatttggctggccatgaggagcgcggaaaagcttttgtagagagatgtgatgtaatcagaggtatgcattaagaagattaatttggcagtagcttatagaaaagattatatggaaaatagattagcagtaaggagatcagctaggacataattgcaaaaggccatatgattaacagggaaggtttgcattcagttggcagttgtggaaacagaaagtaagagatgagggaaatattttggaaatagagttggtattactttttgaagtctgatgttaagggaggcagaattcaagcattaactcttgaggttctatccttgactagccaggataatagggatttcacttagggaaagaattatggggcaaggggagaagggaatgaagaaatgcagtgttcagatttaggcatgttgagcttgaggcactattgcgatgctaagagagttgagggattctgattgtgaggctgggacagaaagaccagagcctcatggccctacttagaggtgaagagaagctctgcatgaaactgatcaaggtataagcctgaccaaaacgcttttgtaattggtgatgataagaataccaacacccttgaagtagaaaaaagccctgtaagaagaaggggtggggaaactagactgccatcactgctgttcatgatgagaaagtagaagtggcacagtagattaatcattagcagtgatagaagtaagagaggcagaatcctagtcaaaggctgtagaaagattgggaaggatgtgttgccttgcggtgacgtgaattagttttcaggcacagagacccagaaaagatagggagaaagaaggagaaagaacaatagagagtagataatagataatcttagaaaagagacaaataaattaagatcaatgtcaaaataggaacaatagtctggaagaatgaaagatgggggtaacccagaagaaacaatgaactttcttctgaatgggagacgaaagcaaaagaagggtcaaggaatggttcacaaaataaatgaaggatgaatgtttaacgcaagtctttaaaaatatgtagaaaatgcaaaaaggagtaaatacagtatgcacatgaatgtaagaattaccaagctataataagggttatacatgaattaaatgaatgttttgagggcacgatcaagaccacgttgttgcttttcccttaagcaagcttagcacatttcctcctcccgtggatgttcttcagtcagagggtggggaagactaaggacagaaggcatctagggcacgaggtgagagaaacgactgagcacaggacacaggctggtagggaagataagtgaatcccaaataggagtgctgagggctccaggatctcttgatcagatgagggaactggtaccactgaagaaagctcaagagaagtgcacttgctaggagaacccagatcccaactaagacgaagtacagagagcacttagggcactgattgagggtactggcgaatttagccacggtgggattgaagttgtctggtagtcagtggaaggattgggcggaggagtctaagtgagcacaagagagcagaaagcctgagaagtcagggaagagggaggagtttgcacctgtgaggataaaggcgatggagcctgagttgtaggtcaatcccttttgttcactcaggtctcaggatccagccaactggaaaaatcagtcatacttctccatctcagagggatgaagcagatcaacctaaacattcctctattgttccattctcgtggtccatttgtctaagactgtctcttccaggacaccaaaggccttgtttgaggaaagcatgtgtttgttgcgaggacatcgaattaaagttaaacttgcttgtctcctaagcctctgcctttaaatagtgaatgacttcctttgtcataaatgaaatcttcagtttacttggatgttactttgattcactatcttaggtctctgtcagggacctaagatagtgtcctctctaatcctcttgggtcctaaactagagaatcattctgactttcaccttcctcaacaccctgtccctctgctattagtccttgctcaacactgtctgttgcatccaacccttccttctataaccagtggtactacccccacccagattactattgttgacattacagaagaggtgcttgctgaggtcagtgtctccaggtggaggccagctaactctctctccagggctacctggatgaatttaccaattcattcaggctggccaatgcccaaagtccactggggaggctcagaatcacagtttcattagaaatctcagaaacggactcactaaccaagctcacaaatgctaaagcataagtaagaatctcaatgtagtaatattccgtaagaaatcctgcagccacacaggccagaatgactaatatattctctctctggcataactgtgtaggaagtctttgcagctgtgtttcctgctccagcaaaagtcctgcccataagactataaatcttcagtccaaaaagccaacacactacaactgccttttttatttccttccactgctaacaaattccagggatgactgccattttctttacatgtgctcgtagattccattcgattacagccaagccttgatggcctgggggaggttattctgtctctgtgtccaggttcttaaccttattgtgcataaaattaaatacagaggatgacaaaggaaaccaaatatgttgaaatgccattattaaaatattttttaaatcgccatatagtaatatatgtgcatctttattagttagaaaatctagccctgggtgtcataattttaaagtagtgatgagcataaagaatatttcaaaatgtatccatcaactatatgtgataggagtatgtctgtgatttctattggtgacaaagtcacagttactgctcataactactctggcttattatctacattcataatttaagaaaatgctaaattgcaatcagaggtttgtataaagatgtaatttttttctcatccagtaatcacaggtttcctgaattctgctcacagacatcaaggatctgtggatcccgggttaagagccccgactgagttgatgtggcatgtctctgctttcctcgcgacatgctgatttcttagtgtatctctcacatcacagtttctaagttcttgggcaagtcattccatttcataaatactacctatcattattaggtatattctccatctttgcaagaacattgttttttacatttgaaaatgtatgagacgatcaccaaaaactggaaacaactgaaatgtttgctaagtggtgaactgataaattgcagtatatctactccattgaatactactagtaaattaaagaaaaaattaataaaaacatgcaacaacatagaggaatgttaaaaggaattatgccaacttcaagaagccacactgacaacgctatttactgcaggactcaatgggtatgacattgtggaacaggcaaaactatagccacagaaaacaaatgagtggttgccaggggctgggaggaaggaggaaattcactacaaaatggtgtgagaaaactttctggatggaaatattacaactcttgattctgttgttaattacatgacttacatacatttgtcaaaattcatataactgtacacctaaaaaagaattttaccatatgtaaattatagtgcaatatatcttttaaaagtatgataaaatatattcagaccttcacataatagaggtctttttaataacatttcactgagaaaatacaagtgtgcatgtagactcgagaatctgcaataactccagaagggcaggggtgcaggtaaccttgacccacaggctgcaccctactgattacacaactatattagtgtcctaaatggccacttagcctgtatatttttctcctccaggctcttccgggctcagtctctccagtttccatcctgttgttctgtcagtaacccagaactctcaataacctcttttaatttttgttctgtcaataacccagaactctcagaactctcaataacccctttatatagacttgttagtggaaaggactttgaaggtcatgaatttccaactctgactcactgctgagccccatccccagtactcctgcctgaggtcagcgagcttctacctgggtaccctagtggcaatggggttccccacctcatgaggtagagtgctctatgggtaataaccctgaattactagataggtttatgttcttacttacagagaaaactcaaacttctcgggagagcactaaagatcttccacagtctgactccaaatggcgtctctggctcatctcattaggttcatctaatccacacggtaggccctgctctactccttgttctcaggccatgcctagtgttcttccacttttgcacctgcactcattctggtttctatgtcttgtaaaacagattgtcttgtcctgtaaactcagtgctcagagacactccctcatccttccttctctaaagagactccaagagtccaataacatctatgatagcaataacaaatatcatagccaaacactcttaactaggcctcagtgtgttatgctgaaattcccaaaccaggtgtaataaatggtttacaggaatggtcccttctgcccttggagttgccaaatgaggcctggggaagctggattccctgggctcattatctccaaatggagaaatctcttccatttatcccaaaatgctaatacacacacacacacacacacacacacacacacacacacacaaaataaatatgtgtgtatatataatatatataattttatctatataaaaattatttttatgcatgtggaaaactgaagaagcacagcattcagatgtctctagggcccagactccatcagatcccaggctctagaactgctcctacccctcctgacctgcttgttccattgtctccatgactatcccactgcctcactcctggtccgaccctctcaccctagctcattaacattgatgcttcgtcagattctacgcttggttactactcctaggttctggattttcctccattcctagtgccacagcactcatgccattaatttcttcttccatccccatcaacttgaagctctcaaatgctttccgacttgtatgggagaggaattccacacactgctcctttttcctctgtagattctatttctccttgatgatcaagcttcaatctcacctcttcacagacagcttccgagatcccaaagtcacttcctccctctgtgaattaccatccacctcatcaactgtttcctgttgactgggcatattttttcctacttcttcaacttttattttaagttcaggggtacatgtgcaggatgtgcaggtttgttacataggtaaaagtgtgccacggtggtttgctacacagatcatcccatcacctaagtagtaagcccagcgtccattagctattcttcctgatgctctccctcccccacttgcccctcctccagcaggccccagtgtgtgttgttccccccatgtgtccacgtgttttcatcattcagctcccacttataagtgacaacatgtggtaattggccttctgtttctgcgttcgtttgctgaggataatgtcttccaactccatccatgtccccgcaaagagcatgatctcattcctttttatttctgcatagcattccatggtgtgtgtatgccacattttctttattcaatttatcattgatgggcatttgggttgattccatgtctctgctattgtgaatagtgctgcaatgaatatacgcatgcatgtgtctttataatagaatgatttatattcctttgagtatatacccagtcatgggattgctgggtcaaatggtatttctgcctctagatctttgaggagttgccacactgtcttccacaattgttgaactaatttacactcacaccaacagtgtaaaagcgttcctttttctctgcaacctcaccagcatctgttgttttttgactttttaatagtagccattctgacaggtgtgagatgatatctcagtgtagttttgatttgtatttctctaaggaccagtgatgttgagcattttttcatacgtacatattcttaataattaaattataagcaatttgaaggcacatgcctctcttgatagctcccatagtgatggctagctagcacagtggctcacattaggaagatgcttaatagttgcttcttttaaattagttgctgaatttaaaatatctctctcagttccaaggttgaaagaaaatagaagtagccaaaatctatatcctgaaccacgcacaatggattatggccacagaatcagtacagctgatctaagggatatgtaagtacagacacagagtcaaccaaataaatcctctttaattctggctggcgcgattgacacataccccaatgcagtctcttggtaaatggggtaagttattaaatatcgcaaggatgtgtttggagaggaaatggtatatatcatatcaggtatccagaaggccacaccccacttcctccttccttcgcagatcatggccagagaggccacctaagtggcctccaactttgagcttgttttgctacactagctgcatgagagctccggggggaaggcggggggtggataaaagaagcccaaaggaaacctgccaaatagattcttttaaaaaataccttaaaaatttaaacttcctcttttgtctgcatatccaccccataggtaggggtggatgagctttgagtaattctagaagccaaaactattaactgtgtctaataactgtttatggataaaatcttctaacacgtgtgtgatcactaagacagatacgaacctggaccaagacatgggtgtcttgcctgaatcatcagagctactgatatacaacaaaatcccccagatagtgacaggtgtgttctcaagccatgggtgagactgaagttgccactcttggttatacagtccccaaatatggggcatggcagcacacaggctaagagttgtggaagattcttatacaagggagttctcaatggttgttcccaaccaggttggcccccaaaattcaaccaagaaactcaaactacaattaacaaaaataaaatatggtctaattaatatatcctagataatgtttgcctttacttggatggctatttacatggacaagggaagaagggaagataagggaaaaggctttttatgtgtttattcaacaatggcggaggagaggcatgccagataaggcagacacgggcattccaaacacaagaaaggtatgtgctgcagagaagtcagataactttcctaggctctcctgcagtccggatgaaatactctcaaaaaattagcccgggccctttgctccaatttttcgcttacctagcaaccatctaactattaattaaattggtattatggttttaacatgaatcttttatgatttgcttaccattaatcaaacccccgaggcttattcacctcaaggggagctgacaaagttgaattattcaacctgcaaagatccagggcccccaaatactgtcatttccactctcccctaacccccaccatgaggcccagtctcagcactcggccagcctatgcccaactcggggtaatcagcttagacatattaatattagtgggcatttcagtatcaacagatcactgtctagcagctgacaggcaccctcagaaaataaaccaagaagaaagggtttatctataatatcaaaatttttcatagataaacctgcccattataaggaagagggcagaagaaccctaaactaagagccaggcaacttgttcattaatcacagcatattccatagaaggaggagaaatgttgtcatcaaattcatctttttcacctcaattaaacatctatgctacagctccacagtcagattgagaggaaaaacagtacgtagctaagaaaagacatagacttgtaactgaaatgcttcactggtgctccttttgttttaaggcattggatcttcatagctactgatcgtgcccaagcacacagtatctgcagcaaccacttaggcctccaggaatgtggtgaccattgaccctaattcattccccttcatggatcctatgtaaccatcctccaaaaagagctttcgcaaactcaaataaacacaggaaaggaagaccttcttatctttgagagtatatgtttagccctataaccctctcttatcataaattgcttcttaggcaagaaacactggatttttcttgtatttgtcattgccattggttccatacaagcattcatttaacaaataatacattccatctccgttttttgctttttccttcatgcttcggccttggttttctctcacctaaaacactacaagcttcttctcccagagctctcactttgactccagactacctacatttaatctttaattctctaccaaaattttctcttatctttatatctttttaattttaattttattttttgtggatacatagtaggtgtatatatttatggggtacatgcaatgttttaatacaggcatgcaatgtgaaataaggacatcatggagaatggggtatccatctcctcaagcatttatcttttcagttacaaacaatccaattacactctttattttaaaatatacaattattaattatagtcactctgttgtgctatcaaatagtagatcttattctttctattttttgtaccctctcgtctttttatattaaaaaataatctttatctctgtaagcttcatcagtgattttccaatgaaatttaggatcttctctataccctgaattgccttactttctccccacttccttgtcttattcaaatgcagatttcattaatgatttccagatcaatgatagttcagaaagcaagcaagtcaaagtgaccaagggcatggcctgaaaactgttctaagagaggaatttacagaacaactattaaatgatgtcaataggattgtattagtccgttttcatacggctataaagaactgcctgagactgggtaatttataaaggaaagaggtttaattgactcacagttcagcacaactgggcaggcctcaggaaacttacaatcatggtagaaggtgaaggggaagcaaagcaccttcctcacaaggcgtcaggaagaagtgccaagcaaagggggaaaagccccttgtaaaactaccagaacctgtgagaactcaatcactatcacaagaacagcatgagggaaccgcccctcgtgattcaattacctccacctggtctctcccttgacacatggggattatgggtgttacaattcaagatgagatttgggtggggacacaaagcctaaccatatcaaggatcaagtggtgggttgaaactaacaggatgagatatatcagatacaaacacagggtcccatatttgggttaaaattcataaatgatcaaagcacaggatgacagataatataggtcattttagattattgtggccaacagatcacagtgggtagtgttatgacgaagggagggtcacagttactacagttacagatggattctgggtacaacatttgcactaaagtgcctttgccaagggaggcaacagtctcgacatcctgtggcctgatctacttcagggactgtgtcttgttcagagcatcacatttgaagagaactttgaccaaggggaatatgccagaaaaggaagttcgggatgctgaggatcttaggaactatgtctaaacaagattcattcacagaagtgggaatgtctatttggcaaaaagaaaatactacttacatggctgttggaagaccagcaatcacaaactcagtttttcaaaaggctgggcagaaacacagatgaaagaaacaggccatgtttaagaaaagataaaagctcacgcatgatatgccactagagaatcacctagcctcagtgttggcggggaggcctggggagtcttgatgtctgagagtgacattctgatgatcactgtcatgtgtaaatgttggcctaaagctgccaatatttttgatttaagagaagcaagaaatgcaaatttttatgcagcatgtctcaatttttaattttggcaactattacaaaatgtttaaagagactctgtgcagcccaaatataacatatctatgggctgatggcagcccagcgttgccagttcacagggtctacaagagatgattcttagtttcaacagggtgcagtgctgaaacgcgtgcacagtagattttgcttcggttatgaaagaacttccaaatatttatgattcatagccagagaaaaggctctctatccaggttctgaacaataggaaatcatcaagaggatattggatgacaatatatgaaagatgttatttgagaaaggattctctcctgaggcatagatgttgaaccaaattctattagttatgcttttacagcaagatagtggtttacagcttacaaaaggcttgtacatcctctcatattaaaagttattagaacagtcctttgaagtagaaaagtaggcatttctattttacaaacgagttggccgagtatctgagatagtagataactcatagaaggtcatccgggaaacggggcagcagaactgggatcgaatgactctggtcatccaactccaaatgcaaaagtctttctgctgctgcttcctagttaaactctaagggtctaagactccattcctagttatggtctcaactacatttgctcattgctgtgaggggtcaacccacctcccggagtcctctcctgcacattctcatgttcctgaaaggcttttctgtcccttccactactccctgtaagctcctgtgcttcacaatttcttgttgaattttttctaatctgactctatcagttatgggaatgttccctcaattcttagtgctccaaaccggacttgctcttggcttgtatttgtccaaaatatttgtcttctctatgttttctacatgtttgtcttataaggacaaaaacctgccttagtttatccatgaacaaagccacgcatgctagtggacacacacacacatgcgcgtgcgcgcgcacacacacacacacacacatacacacagagactttgtatgtgagtaatgaatcatcaaatcatcataatttctggacttgtattaataagtcggccaggaggaaaagaatctgctgtcaatcatggcttctggttctcacagtcatctctactttcttccagcaagtttggttctgtcaaaaaccagctgtcagccttgttcctgcatgcccaatgcagaagagtcagtaaagaagatttggttctctgtatttcaggggcatcaatgccaggttgaaatatgccattctggcccagctcagtggctcacacgtgtaatcccagcactttggaaggccaaagcgggtggattgcttgagctcaggagttcgagaccagcctgggcaagaggctgaggtgggaggatgacctgagcccgggaggtcaaggctgcagcgagctgtgatcgtgccactgcactcgagccagggcgttggagtgagaccctgtcaaaaaaaaaaaaaaaaaggaaggaaaaaaggaaggaaggaagggagggagggaagatgccattcttagattgaagtggactttatctgggcagaacacacacacacatacacacatgcacacacacattgtggagaaattgctgactaagcaaagcttccaaatgacttagtttggctaaaatgtaggcttttaaaaatgtgagcactgccaagggtttttccttgttgacccatggatccatcaagtgcaaacattttctaatgcactatatttaagcctgtgcagctagatgtcattcaacatgaaatacattattacaacttgcatctgtctaaaatcttgcatctaaaatgagagacaaaaaatctataaaaatggaaaacatgcatagaaatatgtgagggaggaaaaaattacccccaagaatgttagtgcacgcagtcacacagggagaagactatttttgttttgttttgattgttttgttttgttttggttgttttgttttggtgacctaactggtcaaatgacctattaagaatatttcatagaacgaatgttccgatgctctaatctctctagacaaggttcatatttgtatgggttacttattctctctttgttgactaagtcaataatcagaatcagcaggtttgcagtcagattggcagggataagcagcctagctcaggagaagtgagtataaaagccccaggctgggagcagccatcacagaagtccactcattcttggcaggatggcttctcatcgtctgctcctcctctgccttgctggactggtatttgtgtctgaggctggccctacggtgagtgtttctgtgacatcccattcctacatttaagattcacgctaaatgaagtagaagtgactccttccagctttgccaaccagcttttattactagggcaagggtacccagcatctatttttaatataattaattcaaacttcaaaaagaatgaagttccactgagcttactgagctgggacttgaactctgagcattctacctcattgctttggtgcattaggtttgtaatatctggtacctctgtttcctcagatagatgatagaaataaagatatgatattaaggaagctgttaatactgaattttcagaaaagtatccctccataaaatgtatttgggggacaaactgcaggagattatattctggccctatagttattcaaaacgtatttattgattaatctttaaaaggcttagtgaacaatattctagtcagatatctaattcttaaatcctctagaagaattaactaatactataaaatgggtctggatgtagttctgacattattttataacaactggtaagagggagtgactatagcaacaactaaaatgatctcaggaaaacctgtttggccctatgtatggtacattacatcttttcagtaattccactcaaatggagacttttaacaaagcaactgttctcaggggacctattttctcccttaaaattcattatacacatccctggttgatagcagtgtgtctggaggcagaaaccattcttgctttggaaacaattacgtctgtgttatactgagtagggaagctcattaattgtcgacacttacgttcctgataatgggatcagtgtgtaattcttgtttcgctccagatttctaataccacaaagaataaatcctttcactctgatcaattttgttaacttctcacgtgtcttctctacacccagggcaccggtgaatccaagtgtcctctgatggtcaaagttctagatgctgtccgaggcagtcctgccatcaatgtggccgtgcatgtgttcagaaaggctgctgatgacacctgggagccatttgcctctgggtaagttgccaaagaaccctcccacaggacttggttttatcttcccgtttgcccctcacttggtagagagaggctcacatcatctgctaaagaatttacaagtagattgaaaaacgtaggcagaggtcaagtatgccctctgaaggatgccctctttttgttttgcttagctaggaagtgaccaggaacctgagcatcatttaggggcagacagtagagaaaagaaggaatcagaactcctctcctctagctgtggtttgcaacccttttgggtcacagaacactttatgtaggtgatgaaaagtaaacattctatgcccagaaaaaatgcacagatacacacacatacaaaatcatatatgtgattttaggagtttcacagattccctggtgtccctgggtaacaccaaagctaagtgtccttgtcttagaattttaggaaaaggtataatgtgtattaacccattaacaaaaggaaaggaattcagaaatattattaaccaggcatctgtctgtagttaatatggatcacccaaaacccaaggcttttgcctaatgaacactttggggcacctactgtgtgcaaggctgggggctgtcaagctcagttaaaaaaaaaaagatagaagagatggatccatgaggcaaagtacagccccaggctaatcccacgatcacccgacttcatgtccaagagtggcttctcaccttcattagccagttcacaattttcatggagtttttctacctgcactagcaaaaacttcaaggaaaatacatattaataaatctaagcaaagtgaccagaagacagagcaatcaggagaccctttgcatccagcagaagaggaactgctaagtatttacatctccacagagaagaatttctgttgggttttaattgaaccccaagaaccacatgattcttcaaccattattgggaagatcattttcttaggtctggttttaactggctttttatttgggaattcatttatgtttatataaaatgccaagcataacatgaaaagtggttacaggactattctaagggagagacagaatggacaccaaaaatattccaatgttcttgtgaatcttttccttgcaccaggacaaaaaaaaaaagaagtgaaaagaagaaaggaggaggggcataatcagagtcagtaaagacaactgctatttttatctatcgtagctgttgcagtcaaatgggaagcaatttccaacattcaactatggagctggtacttacatggaaatagaagttgcctagtgtttgttgctggcaaagagttatcagagaggttaaatatataaaagggaaaagagtcagatacaggttcttcttcctactttaggttttccactgtgtgtgcaaatgatactccctggtggtgtgcagatgcctcaaagctatcctcacaccacaagggagaggagcgagatcctgctgtcctggagaagtgcagagttagaacagctgtggccacttgcatccaatcatcaatcttgaatcacagggactctttcttaagtaaacattatacctggccgggcacggtggctcacgcctgtaatcccagcactttgggatgccaaagtgggcatatcatctgaggtcaggagttcaagaccagcctggccaacatggcaaaactccgtctttatgaaaaatacaaaaattagccaggcatggtggcaggcgcctgtaatcccagctaattgggaggctgaggctggagaatcccttgaatctaggaggcagaggttgcagtgagctgagatcgtgccattgcactccagcctgggtgacaagagtaaaactctgtctcaaaaaaaaaaaattatacctacattctcttcttatcagagaaaaaaatctacagtgagcttttcaaaaagtttttacaaactttttgccatttaatttcagttaggagttttccctacttctgacttagttgaggggaaatgttcataacatgtttataacatgtttatgtgtgttagttggtgggggtgtattactttgccatgccatttgtttcctccatgcgtaacttaatccagactttcacaccttataggaaaaccagtgagtctggagagctgcatgggctcacaactgaggaggaatttgtagaagggatatacaaagtggaaatagacaccaaatcttactggaaggcacttggcatctccccattccatgagcatgcagaggtgagtatacagaccttcgagggttgttttggttttggtttttgcttttggcattccaggaaatgcacagttttactcagtgtaccacagaaatgtcctaaggaaggtgatgaatgaccaaaggttccctttcctattatacaagaaaaaattcacaacactctgagaagcaaatttctttttgactttgatgaaaatccacttagtaacatgacttgaacttacatgaaactactcatagtctattcattccactttatatgaatattgatgtatctgctgttgaaataatagtttatgaggcagccctccagaccccacgtagagtgtatgtaacaagagatgcaccattttatttctcgaaaacccgtaacattcttcattccaaaacacatctggcttctcggaggtctggacaagtgattcttggcaacacatacctatagagacaataaaatcaaagtaataatggcaacacaatagataacatttaccaagcatacaccatgtggcagacacaattataagtgttttccatatttaacctacttaatcctcaggaataagccactgaggtcagtcctattattatccccatcttatagatgaagaaaatgaggcaccaggaagtcaaataacttgtcaaaggtcacaagactaggaaatacacaagtagaaatgtttacaattaaggcccaggctgggtttgccctcagttctgctatgcctcgcattatgccccaggaaactttttcccttgtgaaagccaagcttaaaaaaagaaaagccacatttgtaacgtgctctgttcccctgcctatggtgaggatcttcaaacagttatacatggacccagtccccctgccttctccttaatttcttaagtcatttgaaacagatggctgtcatggaaatagaatccagacatgttggtcagagttaaagatcaactaattccatcaaaaatagctcggcatgaaagggaactattctctggcttagtcatggatgagactttcaattgctataaagtggttcctttattagacaatgttaccagggaaacaacaggggtttgtttgacttctggggcccacaagtcaacaagagagccccatctaccaaggagcatgtccctgactacccctcagccagcagcaagacatggaccccagtcagggcaggagcagggtttcggcggcgcccagcacaagacattgcccctagagtctcagcccctaccctcgagtaatagatctgcctacctgagactgttgtttgcccaagagctgggtctcagcctgatgggaaccatataaaaaggttcactgacatactgcccacatgttgttctctttcattagatcttagcttccttgtctgctcttcattcttgcagtattcattcaacaaacattaaaaaaaaaaaaaagcattctatgtgtggaacactctgctagatgctgtggatttagaaatgaaaatacatcccgacccttggaatggaagggaaaggactgaagtaagacagattaagcaggaccgtcagcccagcttgaagcccagataaatacggagaacaagagagagcgagtagtgagagatgagtcccaatgcctcactttggtgacgggtgcgtggtgggcttcatgcagcttcttctgataaatgcctccttcagaactggtcaactctaccttggccagtgacccaggtggtcatagtagatttaccaagggaaaatggaaacttttattaggagctcttaggcctcttcacttcatggatttttttttcctttttttttgagatggagttttgccctgtcacccaggctggaatgcagtggtgcaatctcagctcactgcaacctccgcctcccaggttcaagcaattctcctgcctcagcctcccgagtagctgggactacaggtgtgcgccaccacaccaggctaatttttgtattttttgtaaagacaggttttcaccacgttggccaggctggtctgaactccagacctcaggtgattcacctgtctcagcctcccaaagtgctgggattacaggtgtgagccaccgtgcccggctacttcatggatttttgattacagattatgcctcttacaatttttaagaagaatcaagtgggctgaaggtcaatgtcaccataagacaaaagacatttttattagttgattctagggaattggccttaaggggagccctttcttcctaagagattcttaggtgattctcacttcctcttgccccagtattatttttgtttttggtatggctcactcagatccttttttcctcctatccctaagtaatccgggtttctttttcccatatttagaacaaaatgtatttatgcagagtgtgtccaaacctcaacccaaggcctgtatacaaaataaatcaaattaaacacatctttactgtcttctacctctttcctgacctcaatatatcccaacttgcctcactctgagaaccaaggctgtcccagcacctgagtcgcagatattctactgatttgacagaactgtgtgactatctggaacagcattttgatccacaatttgcccagttacaaagcttaaatgagctctagtgcatgcatatatatttcaaaattccaccatgatcttccacactctgtattgtaaatagagccctgtaatgcttttacttcgtatttcattgcttgttatacataaaaatatacttttcttcttcatgttagaaaatgcaaagaataggagggtgggggaatctctgggcttggagacaggagacttgccttcctactatggttccatcagaatgtagactgggacaatacaataattcaagtctggtttgctcatctgtaaattgggaagaatgtttccagctccagaatgctaaatctctaagtctgtggttggcagccactattgcagcagctcttcaatgactcaatgcagttttgcattctccctaccttttttttctaaaaccaataaaatagatacagcctttaggctttctgggatttcccttagtcaagctagggtcatcctgactttcggcgtgaatttgcaaaacaagacctgactctgtactcctgctctaaggactgtgcatggttccaaaggcttagcttgccagcatatttgagctttttccttctgttcaaactgttccaaaatataaaagaataaaattaattaagttggcactggacttccggtggtcagtcatgtgtgtcatctgtcacgtttttcgggctctggtggaaatggatctgtctgtcttctctcataggtggtattcacagccaacgactccggcccccgccgctacaccattgccgccctgctgagcccctactcctattccaccacggctgtcgtcaccaatcccaaggaatgagggacttctcctccagtggacctgaaggacgagggatgggatttcatgtaaccaagagtattccatttttactaaagcagtgttttcacctcatatgctatgttagaagtccaggcagagacaataaaacattcctgtgaaaggcacttttcattcca

SEQ ID NO: 5762 - DNA, 30 bp, Homo sapiens
  source 1..30: mol_type = other DNA
gtccactcattcttggcaggatggcttctc

SEQ ID NO: 5763 - DNA, 30 bp, Homo sapiens
  source 1..30: mol_type = other DNA
ctccagactcactggttttcctataaggtg

SEQ ID NO: 5764 - DNA, 30 bp, Homo sapiens
  source 1..30: mol_type = other DNA
ttccatgagcatgcagaggtgagtatacag

SEQ ID NO: 5765 - DNA, 29 bp, Homo sapiens
  source 1..29: mol_type = other DNA
gtccactcattcttggcaggatggcttct

SEQ ID NO: 5766 - DNA, 29 bp, Macaca fascicularis
  source 1..29: mol_type = other DNA
gtccactcgttcttggcaggatggcttct

SEQ ID NO: 5767 - RNA, 20 nt, synthetic construct
  misc_feature 1..20: note = Description of Artificial Sequence: Synthetic oligonucleotide
  source 1..20: mol_type = other RNA
ctgagtgaccaaaaggatat

SEQ ID NO: 5768 - DNA, 29 bp, synthetic construct
  misc_feature 1..29: note = Description of Artificial Sequence: Synthetic oligonucleotide
  source 1..29: mol_type = other DNA
gtggaatatccttttggtcactcagacct

SEQ ID NO: 5769 - DNA, 56 bp, synthetic construct
  source 1..56: mol_type = other DNA
tcgtcggcagcgtcagatgtgtataagagacaggataagcagcctagctcaggaga

SEQ ID NO: 5770 - DNA, 54 bp, synthetic construct
  source 1..54: mol_type = other DNA
gtctcgtgggctcggagatgtgtataagagacaggggccagcctcagacacaaa

SEQ ID NO: 5771 - DNA, 23 bp, synthetic construct
  source 1..23: mol_type = other DNA
gataagcagcctagctcaggaga

SEQ ID NO: 5772 - DNA, 20 bp, synthetic construct
  source 1..20: mol_type = other DNA
gggccagcctcagacacaaa
